United States Patent Application Publication US 2008/0220983 A1 - sequence listing, part 7

SEQ ID NO: 15803 - DNA, 1852 bp, Homo sapiens
acccccatttccttaattatttcaggaataattctcccgaaatcaggtcaaccccatcaccaaccaaccaaccagttgagttccagattctatgtgaattaaaaagtcaatatatgtataattctgagatgacttaggttggacattcaatgttgtgctatgaatttcctctttatgcagagtatctgtttgcttgcagagtggctttctggcttgctgccagcctgtgcatggaccacgcttatgagttcaggatctacggcaatgtgaatcattcagatgtttacaataaaaaacaccacatgagtaaatgaattcactaatgttaatgttaaacttcatggaaaaatagtcctttgaaccttcggtggttagcaattaaagaccctgagttatgtgcaataaatagtaaataaagttataccgaatgatgtattttttgctgtggttgttacttaattaaaataccttaaagatggcaccaatataaagtatataccagtggactattgacctccaattttttaaaaagttgaaattttaacaattaccaatacttttttttcttccttcaattggaaattctgagggatacagttatgtcatgattacttgtgaaatctctccccacaaaaattttactgataataaacatgagtaaatgagaaagtctataaataacaatagactttgcctcataacacgtgttgtgttaggttttgggatggctttctagggagcaattctgaaattacttgacagatacactctttatggtaaacaggtcatttcagagtctagagtgctaaccattacactatggaaccatgataaataggtcatttcaaactgatatgtcacaatgcaatatggatagaatatgaatcccatacattcatccctataactgcattttaaaatatagtctaaatatcatgggaggaggttaaaacctgagaacatggtacaataagaaggaataattttttatctatatataatttcaggagaagggattaaaactaccaaaggttatttgccactccactgcaaacatgttgcctgcaatcctgagctcatgatttagtgtgttgttaagcgtaattctgttgcctcaagtaaataccacttaatgctacacatttttaaacctttaaaagctacagacacaagtaatgaaattatgagtcacttaaggggggaggtaatatgcttgtatgttacattgacattgctctgcatgtctctactgggagatatttggatttcaatgatagcttgactggttggacattgcatcaaatacacgccccatgtatcctttctgtcgtaaagttaagaacgctcttgcatttgatgtggaataaatatagatgatattactatctgctattctgcctttgttctgaaacaattgctttgtcagctaatttcattcaatatttgttttttagacgatctctataagttattaatttaacctgaaaccaaagtggtctccatttaaagttacttaatccctttgtaccacctatttctagttaaatatatgttgctatgcaaataggtaaagtgcttccttgccatgatggtaatggattggaactatgaaggctctcagtgtattggcttctgtaaagatgaggcgtctcctcagaaacaaaacttttcacatttctgcttactagacctgggttgatgtacatggtaagtctcaaacagatgcaagctatgtgcaaaaagtaactttagccaaatggaaatagctggatgctttgagaattacttggttgaagtaagaaaactgtaccatcctctatcctgtgtgccataataaaatagtaaaaaacct

SEQ ID NO: 15804 - DNA, 161 bp, Homo sapiens
atccattgggccagaaggaatgaccattactaacatgacttaagtataattctgacattgaaaatttataacccattaaatacctgtaaatggtatgaatttcagaaatccttacaccaagttgcacatattccataataaagtgctgtgttgtgaatgaa

SEQ ID NO: 15805 - DNA, 2007 bp, Homo sapiens
gaattttaggggctggaggaagatgtaaaagatgaaaatgttttccttatcacttttctttctccacccactcagttgtctagaagaaataacactgtaaggaaatttaaaaaaaaaacatttagaggattatgcttgttttgagtggtgcataagggaaaaaactgactttttttccatattctgatttttaacagaaaagcactcatttaatagatgtagggaaactagatattgctgccttttgaatggggtaggggggtttacctggttttatgaccaggcatagtatctattatatttgcttttaaataggcatgatgtggaaataccatcttggtttgagatgcatttgaggattttaatttatggaaagcacaacatatgcaattatatttattgaattcctagatgcagtatggatatttaaattgttaaaactttatgaaaacttggaaaaggttgttcaggtttataaatagctttagtgatgcctcccctctttaaatacctgtcacaccgtatgaatatggtgagatcagactccctaagactcttttcaggttcatttttataatgtttactttttaggacagaacagtagctaaattaaagtaatatccagttcttactgattgagacagagtggaaagaaagacatcattgtacatcactgtcattccaaaggtacagtgtaactctggatggaggaataacttacctatcactacaacacttacaaatgagaatttctcagaatttcattctaggcaagttccactcaacaccagatcaagcaattctatctatttacactattagcctagttttctcatacagtcatcacaagcataggaagatacttcaaaaccaaaaaaaccaaggtgcatcattaatattcatttaattcaaataccaaatagtttacatagggccagcttagaaatagatactaaatccagagctactgcaatcaaagcttatatgagtgaatatggtagagttgcctgctaaaaggcaatgtaatataattgcagctagaaccctacagtggggaatgaggaattttaaacacacatttgattacagccaccaaaaaaatagacgtaaaaataaaggcatttggctggtccaagatgtaattatcaatcagtcagcacctgtgattcttttacttatttttttgtggttttttttttttaaacaaattttagcccaattttcttgagtcattctctctctgcagcagcagaggaagggcctgtacctccctaccaatgacttggtgtccttattttctaccccaagagcagggatattagctgtgtccaaatgggttctgaattctacagactcatcaacatgaggcaaggaatcattgaaaaccacctgtgtctcctttgggagaatgacatatctttagtatttacgtagcttattcttctatatctacatatgcaaagctttccttaacagtaaagggtacatatgcatagtgggaggagatcagacctttacaagtgaaggaaagcaacttcagaaatgaattattttctttgctttattatttttaccaagacagagaagtattgtattgagagataatctattttcataatcaatatgtgcctaaattatatttaaatcatttcactctgtactatattttcaggaattacagaatgtggtattcattcacttaaaggtacctctgtagaaataacctaaaactgcagaaggatctgaaagatctaaacatggtgtgcttagaaactgcagattttagatctaatgtatactgcattaataaatgatataaagtgtttgttgaaaaggagtttcttctcttccttttgaaaatcatcactttctgtattttgcttacatttcttcaatatgtgttgacaaccagccctgtggttctgggtagcaaaggaaatacagtataacttaatttgttatggattagtctttttgaaagtaccattaaagtaaatttatttcttt

SEQ ID NO: 15806 - DNA, 2981 bp, Homo sapiens
aaaccacctgggggcaggacccacagccagtgggctaagacctttaaaaaatttttttctttaatgtatgggactgaaatcaaaccatgaaagccaattattgaccttccttccttccttccttccctcccttcctccttctctccttctctcctcctctctcctctcctctcctctctttccttccttccttccttttttctttttctctttcttctttatttcttgggtctcactctcatcacccaggctagagtgcagtggcacaaaaatctcggctcactgcagccttgacttcccaggctcaggctcaggtgatcctcacaccttagcctcccaagtacctgggactacaggcacgcaccaccatgcctagctattcttttgtatttttggtagagacagggttttgctgtgttgctcaggctggtctggaacccctaggctcaaatgatgtgcccaactcggcctcccaaagtgctgggattacaggcatgaaccgccatgcctggcccttgatttttctttttaagaaaaaaatatctaggagtttcttagaccctatgtagattattaatgaacaaaagattaaactccaaatattaaatagtaagcctgaaggaatctgaaacacttgtacttccaattttctttaaataatcccaaatagaccagaattggcccataccatagaagaaagaattggcagtcaaaaaaaaaaataccttttgtaatgtttgaaaaataaagctgtttgacttgtcaggtgttttcctttctcaaatcagcaaattctctctgagtgcctggctttgtgagacactgtacaaggagttacaagactacagctataacctgcagttgagcagttataaacctacaaaatgggccctgccctcagagaggttccagtctagatgaggagctgatctagacaggtaaaaggctaactaaccctttgtgtaaataagttcatcaccccagtaaaagtgtcatcacccagtgaataggaccacctctgcctgcagatttttgttgttgttgttgtcattgttgttgttgttttaacctgggaagtgttcttcctgcctttctgctaggtgtcagatagatggtcccagagctaggtgctgtgtcaggccctgaagacacagatgactcaacctaagctttactttccagaggtccacagcctgagaggtgtccccaaagaaagggggacatgaggggactgcatgcttgagagcagggttgtttagggcaggtttggatttagtgagcaggctggtttgcttagagaaggcttttagtggcaacaaaggatgaagaggagagaaaaggaactcacatttattgagggcctactgtgtgcaaagtgtttcatgtatatctcattgaatgtatacagccaccctgttgtggtataattttgctctttataaagagaaagaccgaagctcagatgagttaagtggtctcctcaacaccaaaatgccaagaagtgatggagcctagacagaagcccagaactttctgactcacactagtccatcctctaccatcacgatgactttcaaattgtgctctgcagttctgcagattttctagcagtgccatctccaaaatgtgttttaaactctttatttttttaattattattagtattattttgagactgagtcttgctctatcacccaggctggagtgcagtggtgcaatctcagctcactgcaacctccgcctcccaggttcaagcgatttcgtgcctcagcctcccgagtagctgggattacaggcacccaccaccacgcccagctaatttttgtatttttagtagaaatggggtttcaccatgttggccaggctggtctcgaactcctgacctcaagtgatccactcacctcggcctcccaaagtgctgggattacaggtgtgagccaccatgcctgggctaaactctttaagtctctagtaaatgcagctagattcaaatgggctgataaccaaattttaacacatcagcattcaccaccaggtttacttttattttcagattggctcattttgtgcagaccttagagcaaagtttcctttatggtatctgtgtacgtatccaaacttcttttaattgttcacagattttaaaagcggtagcaccacatggttgtgtagatcagacctgtgtatttagatcagacctgtgtatcacgtaagtgtgtgagtgcagtgcagatgagcaccatttagttatatgtgctaggcaaatctccaacacagttgatgtgtagtcttgtggtagatttgtgcatactgtaagcaaattgcttagcttctctagacatcagtttccacatctgaaaaataagaagatgagagtacacggttgttatgaacaaatgacttaatgctttttaagcacgttgcatgacatctggaacacagaaagccctcaatacattgaagctcttaggattttcacgatgttcctgtctgctcaatgcatgctttctttattgttctgacagttgtgtggtaacaagctaatatgcttccagttgacttccagtctaccctggtgttagaaaccgtttcatctcttattgtaaatttgagtgcttgttgttttttatatttgtgatgactcttccagcagttgttgacaattgttagaggtttgacttttaaataattacttattttttctgattgtggttcagtttaactgaagaatatcctgagattgtaagaaaagcattttttaaaaggtatcacttgtgatcatttatctttctaaattctatttttaatactgttccaccaaagtgatgcagtggttaccatgacaccctaatttcatgtgtttttgtatttatgaaaatagtttcattgtcatttattggcggtatacaaagtaaaatgttataaatgtgaagttataaaataaatatatgctaataaaatcctgagtttttctgtttcct

SEQ ID NO: 15807 - DNA, 444 bp, Homo sapiens
gacaggaaagatgcagaggaaaggggaataatcttaggtacccaccccacttccttctcggaaggccagctcttcttggaggacaagacaggaccaatcaaagaggggacctgctgggaatggggtgggtggtagacccaactcatcaggcagcgggtagggcacagggaagagggagggtgtctcacaaccaaccagttcagaatgatacggaacagcatttccctgcagctaatgctttcttggtcactctgtgcccacttcaacgaaaaccaccatgggaaacagaatttcatgcacaatccaaaagactataaatataggattatgatttcatcatgaatattttgagcacacactctaagtttggagctatttcttgatggaagtgaggggattttattttcaggctcaacctactgacagccacatttgacatttatg

SEQ ID NO: 15808 - DNA, 440 bp, Homo sapiens
tttttgtatttttagtagagacggggtttcaccatgttggccaggatgatctcgatctcttgacctcatgatctgcctgcctcagcctcccaaagtgctgggattacaggcgtgagccaccgtgcccggcccaactattttttttttttatcttttttaacagtgcaatcctttctgtggatgaaatcttgctcagaagctcaatatgcaaaagaaagaaaaacagcagggctggacggatgttgggagtggggtaagaccccaaccactcagaaccacccccccaacacacacacacattctctccatggtgactggtgaggggcctctagagggtacatagtacaccatggagcacggtttaagcaccactggactacacattcttctgtggcagttatcttaccttcccatagacacccagcccatagccattggtt

SEQ ID NO: 15809 - DNA, 363 bp, Homo sapiens
agccagcttcccgtccacgactgttgtccttactgcccaaggaaggggagcatgaaacccaccactggtcctgcgacccactgtctttggaatccaccccaggagcccaggagccttgcctgacacttggatttacttctttatcaagcatccatctgactaaggcacaaatccaacatgttactgttactgatacaggaaaaacagtaacttaaggaatgatcatgaatgcaaagggaaagaggaaaagagccttcagggacaaatagctcgattttttgtaaatcagtttcatacaacctccctcccccatttcattcttaaaagttaattgagaatcatcagccacgtgtagggtgtgag

SEQ ID NO: 15810 - DNA, 197 bp, Homo sapiens
tctccaggtagctggagacctaggcagtctgcaaatgaggagtcagctggaagctatggctatgtattatgtgacatcgcttgttcctaagtgaaaactggatatcccaaccttctggcccagtaggtttcatggttaagacctggtagtgagaacattttaggaactatttgcttgggcaggcaatttttcactct

SEQ ID NO: 15811 - DNA, 547 bp, Homo sapiens
agcctagaggccaaagaactttccaggtcagccggacagctccagcagctccacgttccaggcagcctcgcccgccggctgcgctcccagcactggggtttggggggaggggggtggccaaggggcgtttcctctgcttttggtgtttgtacatgttaagaattgaccagtgaagccatcctatttgtttccggggaacaatgacggggtgggagaggggagaggagagagtttgggaaagggagatggagaagaactcaaggacattgcaaccctgcccggcgcagatctgattttcacatctctacctggacattgagcctccaggcaccatgttgaggagagatgaaaaccagggcggtagaacttcagggtgaaggacagagtcctgggtggggcagcggctgcagggcgcaccagagaacccagccagaggggttgtgagtaccagtggtgttgcttccaccctgcagcaggtgggatgaggtctgtgtgtgtgtgtgaaccatcattttttgatcatcatgaccaatgaaacattgactcc

SEQ ID NO: 15812 - DNA, 2663 bp, Homo sapiens
gctggcccggggctgccccggtcttgtgccacagcactgttttctttctgccctcttcctaatgcccacactgcttgggcactattgcgcccctgcctccttgccaggctcttcctcctgtcctgcctggtccttttccatgactccaggctgtgcctctctccatgtttggtcccttctgtgcccatggtcaggagctattcgggtggcacctcgctggccaggctctcccgagtcgtggcacctccacaatgtgaattttctgaatccctattccaggatttctgggaataatgtttacttctagaatgggcctgttgtaaaccatctcatcgaggtgtggtaaagccattggatgaggaggggactgccatggaaaggagagtttgttacttacggttctgagaggaggggccacataggaaagccccacggtgggtcagaaggcggaaggagggaggggaacgtgtgggcaagagacttcctctggtttcctcaggaggaaatgggcaaggcagagtaagcaggggagacaggtttaagggtagctggcttgagtaatttcagtggctctcaggataggggctgccctttttgtctgatacctggccccgggatagtcaggacaggtgaatgttggcctggggtgtgacagccctgggagagccatgtgaaggaggcagctggcgccatcgctccggattagttggtttccataggaaaggcatgctttcagccagatgcttgccatctctagggattgggggattggctagcctgggaggatcagtctgtccaggtcagcgaggccccagataccagagcatcaagagtacaggaaatacagttaatgcagggcctctgtgtggctggatcctccgtctccatcagatcagctctgattgatctattcttgcacgatttcctctgaacacagggttccagagtacttaaacacaacattttttaaatcgtgatttcggcctatttccttgccaggcctgtttccccaccaggaaatgagataggaggactggatgaggatgtcctgttatagttgctgtggaggaagttcctctggttaattctcatcagcgtctgcagaaaagaaggaaagagggcacccttttcagttgggaagaaaggagaggggtggcgccatggacgtggccctaaacgctgtgggagagggaagaggaggctgggcctcgctgccctcttgtctctgctgacttcagcctggtcatgcttgctctgccacttgcgatttcatccctaatttcttcctccaccatgcctgcagacttttccctgggcttgttttttctcgcacatctctgaagagtttttaatcttcagctcatcatgtcccaggaagtggcatcataaaaggaaatatttttttttcctaggagcagtgttaaaatctgggtcacattcctgaccaaggacagcatcctgccttctgcccatccccttcagttcacaaaagctgacattttaaacaaatcatgactcacacgtattaattggttataaatatgttgtgtacactggttagataaaacttaaggccacaaggagggcccaggtaggcgatgtcagtgtgtgaaggggctggattgggcgtggtgaggatgttggcaaaccagtgcatgcacctggttggaagatgctcagcctcacaaaagctccaagccctttgggagccaaagtgtctgagagtgtgaccctctcctgtaaagtatttatcccacccattaatataatttctgtataataaacttgacctgaaattatttcattctttatattaaacttttaaaaatgttttttattttcaccttagatatgggaagagttttttttttttttttttttttaacaggataacttgagcaggctaggcctcttaaaaaaaaatttgagctaaaactcatttttcttttggcattttcttttcaatgttcttataagcaaagttcatccatgttgtagcatgtgttcaactttattttttcatcgggtaatattccattgtatggaatggtagtactacattttatttatcatgcatcgattggtggacatttggatcgtttctacttcttgactattatacataatgctgctaggaacttttgtgtatgagtttttgtgtggacatatgttttcatttctctttggtatatgcctgggagcagatttgctggatcatatgaaactctatttaacccttgagggactcccaaactgttttccaatgtggtgacacaattttatatcccatcaacagggcatgagggttctgatgactccacatccctcagtgctttttattatctatcttttaacttagccatcctagtaggggtaatgtggcatctcattgtgattttggtttgcatttccctgatggcgaatgatattgagcatcttttcatgagcttattggccatttgcatatcttcttaggacagctatctttagatcacttgctcattttttaattgggttatttgtctttttattattgagttgtaagagtccttttatagcctggcacaagtccctttaactggtatatgattataaaatttttctccgtgagctgtttcatttccttgatgatgtcctttgaaatactaaagcttttaattttg

SEQ ID NO: 15813 - DNA, 1292 bp, Homo sapiens
cctttccatgtttagcgcttccttcaggagctcttttagggcaggcctggtggtgacaaaatctctcagcatttgcttgtctataaagtattttatttctccttcacttatgaagcttagtttggctggatatgaaattctgggttgaaaattcttttctttaagaatgttgaatattggcccccactctcttctggcttgtagggtttctgccgagagatccgctgttagtctgatgggctttcctttgagggtaacccgacctttctctctggctgcccttaacattttttccttcatttcaactttggtgaatctgacaattatgtgtcttggagttgctcttctcgaggagtatctttgtggcgttctctgtatttcctgaatctgaacgttggcctgccttgctagattggggaagttctcctggataatatcctgcagagtgttttccaacttggttccattctccacatcactttcaggtacaccaatcagacgtagatttggtcttttcacatagtcccatatttcttggaggctttgctcatttctttttattcttttttctctaaacttcccttctcacttcatttcattcatttcatcttccattgctgataccctttcttccagttgatcgcatcggctcctgaggcttctgcattcttcacgtagttctcgagccttggttttcagctccatcagctcctttaagcacttctctgtttggttattctagttatacattcttctaaatttttttcaaagttttcaacttctttgcctttggtttgaatgtcctcccgtagctcagagtaatttgatcgtctgaagccttcttctctcagctcgtcaaaatcattctccatccagctttgttccgttgctggtgaggaactgcgttcctttggaggaggagaggcgctctgcgttttagagtttccagtttttctgttctgttttttccccatctttgtggttttatctacttttggtctttgatgatggtgatgtacagatgggttttcggtgtagatgtcctttctggttgttagttttccttctaacagacaggaccctcagctgcaggtctgttggaataccctgccgtgtgaggtgtcagtgtgcccctgctggggggtgcctcccagttaggctgctcgggggtcaggggtcagggacccacttgaggaggcagtctgcccgttctcagatctccagctgcgtgctgggagaaccactgctctcttcaaagctgtcagacagggacacttaagtctccagaggtt

SEQ ID NO: 15814 - DNA, 1306 bp, Homo sapiens
gatgtggatgttgcttttgcacctacgggggcatctgagtccagctccccccaagatgagctgcagccccccagagagagctctgcacgtcaccaagtaaccaggccccagcctccaggcccccaactccgcccagcctctccccgctctggatcctgcactctaacactcgactctgctgctcatgggaagaacagaattgctcctgcatgcaactaattcaataaaactgtcttgtgagctgatcgcttggagggtcctctttttatgttgagttgctgcttcccggcatgccttcattttgctatggggggcaggcaggggggatggaaaataagtagaaacaaaaaagcagtggctaagatggtatagggactgtcataccagtgaagaataaaagggtgaagaataaaagggatatgatgacaaggttgatccacttcaagaattgcttgctttcaggaagagagatgtgtttcaacaagccaactaaaatatattgctgcaaatggaagcttttctgttctattataaaactgtcgatgtattctgaccaaggtgcgacaatctcctaaaggaatacactgaaagttaaggagaagaatcagtaagtgtaaggtgtacttggtattataatgcataattgatgttttcgttatgaaaacatttggtgcccagaagtccaaattatcagttttatttgtaagagctattgcttttgcagcggttttatttgtaaaagctgttgatttcgagttgtaagagctcagcatcccaggggcatcttcttgactgtggcatttcctgtccaccgccggtttatatgatcttcatacctttccctggaccacaggcgtttctcggcttttagtctgaaccatagctgggctgcagtaccctacgctgccagcaggtggccatgactacccgtggtaccaatctcagtcttaaagctcaggcttttcgttcattaacattctctgatagaattctggtcatcagatgtactgcaatggaacaaaactcatctggctgcatcccaggtgtgtagcaaagtccacatgtaaatttatagcttagaatattcttaagtcactgtcccttgtctctctttgaagttataaacaacaaacttaaagcttagcttatgtccaaggtaagtattttagcatggctgtcaaggaaattcagagtaaagtcagtgtgattcacttaatgatatacattaattagaattatggggtcagaggtatttgcttaagtgatcataattgtaaagtatatgtcacattgtcacattaatgtc

SEQ ID NO: 15815 - DNA, 2900 bp, Homo sapiens
aaggagaaaaggagaaaaggacctttgaaagatgtgaatgtagagacaattgcagaccttttggtttcatctgtgttctgaaatataaaatacaaccaaaattctaccttcatcctacccagaaattattgattttcaagttttaaaaaaattgtaccttttttgctgacagaaaaggatcagatatgtataaaatagttgaacttgacagcatataacttaaagtgaaaatgtttttgccagaacatgtcttggtaccttgtgaaagcaggctgcccttgttcttgagatagactttaaaatgaaccagctctgaaaagtacttctgctgctctggtctatccctgaaaacagatgtcttgaaacacttttcatattcttaaaataatcttcacttctgttaagaagaacatgttggtgggtaattatgcgaatgtttccctgtccctgatttctcgattaggcgtatgggttttgaaaaagagatttttcagaagattgtcagcttcagtattcatgttccatcgtgtcatctgggtctgttagtgtagtgaccctcagtgcagtctgtcccagcgtttacgtccttgcttcctctgagcagaggcctccatcttagtatcaacatatttaaagaaattgatggtgttcatcaagctggggcctgtggcagttgttgcctgagcaccaagtaacccaagccacctatgtgacaacttctgggcccaggagtaatttctcagcattgagggtaaaataggatggagtgctctgttgatcatttgggagatgtaggttacctgatttgtgccttaggatgcagcgtgaagcagaagtccatattgcaattatgattttagaaggaactaagcattttactcacacccacagcagcaagaatgacctcctgcagcagatattccacctgtaatagcactttggaactgtgggcaaaaccaaaaggctagtgtttccatttattccatgttggtgtatggggttgaactggaaaattccctgaggcaaaactcactggccaaattttgagagggtatagaaaatgactttagagatgagtggttttgtgtatgtgtctgatgatattcagtctgatgttccgcaattttaaaagttataataaaataccatttttttaatctggaaggacattgatatatgaattcttagaatttgctattaaaaagggtagcccccattccacaagctggttttgagggtgatcttgctctaaaaaacctcattcatcataggctcagtctgacaggttctgtacggggctatcatctttctcctcctctgctaaatgcctctttcttccagctgctcactgggtcaaagggatgtcctttctcagatgtattcttgatacatctcagatgtattcgtagctgtgctccttccatacttccaaggagtccggcttctacagaattcctctgtacctcacactgcaacacatgtagatagcgcttttgaaaaatacatatatttttactatagtatgagaggtcctggggctcaaactttaaacatttcctaactcagcttacactggtttaaaatgtccaggtctctgctgaattctcttgttgaattcatagctctgtgttgattcctatgcccctaaccctgcagcctctttgttttatttttttccccatctctgttggtcccagggaaagcaaggaaattttcttttgaggacttataggttgattgcccacaggtcaaactgttggcattgaactcctctcatttcttgccattggattgtttcctaaacgttggataggagaattcgaaattgttgctatttttatgagctgtgcccttgatcaaatctgtgctgtgggtctgagtcactttgccaatgtcgtcttcagtttcaacactctgatcagcatgcaggcgaggggcatgtttaatttacttcactaactgctatattctatagctttagacttcatatttcttatccacctttgtctaggctcacgatctttgggcaagggagctttgtcaccgtggttgggctagaacaaatattgagaagtttaccaacacagatgttgagaagtttattgaaaggcactgacattagcagaataagtgatggacattagttgaaccccttcagtgtctatgtgttttattgtattgtctttaactcgttcttgaagcacagatttcagcgagcctttcagctattcagtgccagcggttttccccactcaggaaagatggtgtgagccatacacacagcaggattagacggggagagtttcagctgcagcttctagtttaagaccaaagcccttcctcccgctgctgcatctgtctgagaggggaagctcttgttttccaagctggaaccgtttatgaggaaaactgagcagggtggcaaaatggaaaaggaacaattttctagtttttcctacgcgtgatattgacgcgtgctttttctttgatttgaggtacagcatgtaaataacaaatttccatattcaaaatgatcatattagagtgactgagtgaccttttgattttgaagcagactaaaatctgaccagaccacaatgaaaagtataaaattagaaacttaaattccaagctaaatttcagctttgacccacctaactccagtgaataggtggcagctcagaaacaaggacagcactgctgctgccagagcaagctcacatccagctggcacttcgtgagagctccttcctgccgggcacgtgtgagttcagcgtgggcaagagacttttatgcacattctgtcattcaaaagggaaatgatgccaaccccagatgcagcatgtcctgaatgaatgatctgtaaaatacaataataaaagcttatagtttgagtagaa

SEQ ID NO: 15816 - DNA, 682 bp, Homo sapiens
tgatcatctcagctgaagtgtggcttgcgtaaataactgtttattccaaaatatttacatagttactatcagtagttattagactctaaaattggcatatttgaggaccatagtttcttgttaacatatggataactatttctaatatgaaatatgcttatattggctataagcacttggaattgtactgggttttctgtaaagttttagaaactagctacataagtactttgatactgctcatgctgacttaaaacactagcagtaaaacgctgtaaactgtaacattaaattgaatgaccattacttttattaatgatctttcttaaatattctatattttaatggatctactgacattagcactttgtacagtacaaaataaagtctacatttgtttaaaacactgaaccttttgctgatgtgtttatcaaatgataactggaagctgaggagaatatgcctcaaaaagagtagctccttggatacttcagactctggttacagattgtcttgatctcttggatctcctcagatctttggtttttgctttaatttattaaatgtattttccatactgagtttaaaatttattaatttgtaccttaagcatttcccagctgtgtaaaaacaataaaactcaaataggatgataaagaataaaggacactttgggtaccag

SEQ ID NO: 15817 - DNA, 1701 bp, Homo sapiens
aagtgggcagagcccaagttcggggtcctgcacagagcacccttcctgcatccctggggtggggcacagctcggggccaccctgaccatgcctcgaccacaccccgtccagcattctcagtcctcacacctgcatcccaggaccgtgggggccggtcgtcatttccctcttgaacatgtgctccgaagtataactctgggacctactgcccgtctctctcttccaccaggttcctgcatgaggagccctgatcaactggatcaccactttgcccagcctctgaacaccatgcaccaggcctcaatatcccagttccctttggccttttagttacaggtgaatgctgagaatgtgtcagagacaagtgcagcagcagcgatggttggtagtatagatcatttactcttcagacaattcccaaacctccattagtccaagagtttctacatcttcctccccagcaagaggcaacgtcaagtgatgaatttcccccctttactctgcctctgctccccatttgctagtttgaggaagtgacatagaggagaagccagctgtaggggcaagagggaaatgcaagtcacctgcaggaatccagctagatttggagaagggaatgaaactaacattgaatgactaccatggcacgctaaatagtatcttgggtgccaaattcatgtatccacttagctgcattggtccagggcatgtcagtctggatacagccttacctccaggtagcacttaactggtccattcacctagactgcaagtaagaagacaaaatgactgagaccgtgtgcccacctgaacttattgtctttacttggcctgagctaaaagcttgggtgcaggacctgtgtaactagaaagttgcctacttcagaacctccagggcgtgagtgcaaggtcaaacatgactggcttccaggccgaccatcaatgtaggaggagagctgatgtggagggtgacatgggggctgcccatgttaaacctgagtccagtgctctggcattgggcagtcacggttaaagccaagtcatgtgtgtctcagctgtttggaggtgatgattttgcatcttccaagcctcttcaggtgtgaatctgtggtcaggaaaacacaagtcctaatggaacccttaggggggaaggaaatgaagattccctataacctctgggggtggggagtaggaataaggggccttgggcctccataaatctgcaatctgcaccctcctcctagagacagggagatcgtgttctgctttttacatgaggagcagaactgggccatacacatgttcaagaactaggggagctacctggtagcaagtgagtgcagacccacctcaccttgggggaatctcaaactcataggcctcagatacacgatcacctgtcatatcaggtgagcactggcctgcttggggagagacctgggcccctccaggtgtaggaacagcaacactcctggctgacaactaagccaatatggccctaggtcattcttgcttccaatatgcttgccactccttaaatgtcctaatgatgagaaactctctttctgaccaattgctatgtttacataacacgcatgtactcatgcatcccttgccagagcccatatatgtatgcatatataaacatagcactttttactacatagctcagcacattgcaaggtttgcatttaagttaaa

SEQ ID NO: 15818 - DNA, 3132 bp, Homo sapiens
gctgtgctgcaggttctactctgttcctggccctgccggcagccactgacaagaggccagtgtgtcaccagccctcagcagaaaccgaaagagaaagaacggaaacacggagtttgggctctgttggctaaggtgtaacacttaaagcaattttctcccattgtgcgaacattttattttttaaaaaaaagaaacaaaaatatttttccccctaaaataggagagagccaaaactgaccaaggctattcagcagtgaaccagtgaccaaagaattaattaccctccgtttcccacatccccactctctaggggattagcttgtgcgtgtcaaaagaaggaacagctcgttctgcttcctgctgagtcggtgaattctttgctttctaaactcttccagaaaggactgtgagcaagatgaatttacttttcttaaaaaaaaaaaaaaaaaaaaaaaaaaagagtttctggctgatgggtgactcagagtgcaggactgcctggccgtggggcagaggggtttgcccttctcggagggtacctcctgttccctgtctgagcatcctgcatggaagtcaaaggaaatccctttcttggtgacgacttaaatctgggttccctcagacattgggttgcaccccaacaaatattaaatggcttcttcttaaagcccagagaaagaggttttttaaaagactgtcgccaaatagctgagccaaaaggctgatcagaattcactttttggaatgtggcagttaaacactaccttgatcattctctcctctttcctcgaggaactcctggagggtttgagcgtctggaaactctctgctctgacccgaggaagcaccctcctgacgccgccttcctccggttattgaaaggacgcctcagaaatgctttgttttcttttacgatgtattcagaagcctttactgattaaagttttcttttatttgggtggccgggagagacccagggaggttctggaggttcctttctgtctcctggccccaccagggatttccccatttctgtttgctgcctgaaagcaggatgaggaaggccaaggagagtccttgcacccgtgagcgtcaggatgaggaaatgacaggaggaagacgtgggtttgggttagtggctgctggcgttttggcccttggtgtttctggagcctccagggatctaggggagcctgggctgcgtgcatgtcgataagcagagctgttcttggggagaaggagggaggtctcgggagtgtagcaccatgccaaccagccctgcgcgaagacagagtgagccacgcccggatggcagggcatgtttctgttttggtgtctcactttcctcccagcgtgacttatttggggattcctcagggcctactggaatgtgactgcccactgcccagctgcctcgggtacaagtcctggccctatgtcccagctgtcaggggctcagggaatcctacccagccacctgtcctgggatggagtgtcagcatccaccccttggttgtcatcgaggccgccctcccagtcctgggtgaagatatttgggccaccagggctcccttggccccttcacgtaggaaatagacacgtgctttttaatgcaggacactttgagtgttacaaaatctgtagacctggcagtagggtcatgatgttgggaagggtgtagtgccctaggttggtgacagaagggacagacacttgtgcacaggtgtctttggtgatggggtttttttttttataacttagtaaaaaaaaaaaaatgtatgtggaattctgtctcttggtaaagctcaaagccaggctagcctgaggtggcgcagggctctccttcctgtcccttcgatctccttgagaattaagagctggcagctgctgatggtgtttcccaacccccctcacttcccaagacaacccccagcttcaggtcctcatggggaggggagggcacgttcttgacacatgggaacttcgctcaggagggcctccccttcccctctccctcagagttttcactgccgtctcgtctttagaaagctgtttgaattccccccgcccccagtttggaccgtgtagatataactggatatacggatttttctctttgtgcaggcttcttatgccgttggtatacagggcaggaaagagaggaataaagggagagagcagtgtggaaaccacggtggttttgctttgttcttactaggttttggtgccaccttccctgcctgcgcttgtgccccctctcctccttggcactggcggcctccttgcctcccttccacccgtgctgccatcccgtgcctgtcgtgttggttcttcacacgtgctctgttctcggggttgttccattcatgccttcttggagggtgagggtggcttgggaaccgacccagtgatcatgcctactttcttctttgtatctccctccttcccagcccacccgggcagcagactctgatggaaggaaggtgccgtaggtgggcttttagaaactaacgggactggttttcaaagcagttatcttgggaaactgtttattccagcgatgtgacttttttcagaatatttcttggaatcatattcagagtctggggctgtgtgttgagcagccttaaggatgctagacactcatttagtgcccagggagtccagcgaatgacgtctgtggccaagcgaggtctcaggtgcaaagcaaaaggaccatttaaagtaaaatagcttggattcaatcatgtgacttttaaattggctcagaaagcaattttgtaatttcagagagtgttttgagccatggccacgttgtcattgtgagtctatagcttgactccttggagaacaatattcatttggttgtggagactgatttgctgggagaaatctgtcctgttactttctggtcatcccaggttctgacttttaccaggggcaaaaaaaaaaaaagcaagagggagataaatcccatctgtgagtttgtcttattggcgcctttttcctcagctgtcttccaagtattatttttactgttaaaaaattttttaaaaatgtgaaatgtaatgtttttacagcaacaatatgaaatatattttataaggaataaaatggtaccttgtctgattt

SEQ ID NO: 15819 - DNA, 314 bp, Homo sapiens
gtgccagctctcccctaaaagttccagctcatctcgcctggcctccccctgagtcagtgggactcccagacactgccaccacagctgaaattctcatgcagcatcctcacaggcaccctgggccccaagcatgactcatccaggttccagagccaaagtggactgaacatggaaagacttttattatagaaatgacaagatgctttgcacagtggagagctgaatttacttggctcccattagaaactctttcagcttaagtacttattgtggtagtgagtcctacggtatttcagtaaaaaggaattcatggc

SEQ ID NO: 15820 - DNA, 483 bp, Homo sapiens
gtgggccatctgagctacttccctgaaatcctgcagtccctcactggctgccctcacaagccacctgaggagtggcatgagaggccattaactgtgtctttgtggtgtcctctggcttaaggagtgaagaggtggctcttgagggaaatggtctggacttattcccagcactgtttcaggcaagaactttccctttcaacttcaggctcattttcttctcaactctggctctctcaaggagctggagggtggcagaagtgggacaggagaagttttccaagaggttcatgggaggcggaggtgactggctggctgtcttgcatcagtcccaggcctcggccaggggagccagcctttggtttcgtttacttgcctacagtgctgtacgcaataagatgatgatcccaaaatatggtaaagtgaacccatctgtctgcattttctactctgagcccatttgttaataaacacttatttttatat

SEQ ID NO: 15821 - DNA, 3225 bp, Homo sapiens
gccgctgccttagggcgaacttttctgggggtgcccggccccttttgagccctgccagtgacagccctgaggagccaggagcccggtggccccttccccaggggcagggcgatgaatgctttttgcacgacacagggctggtgacctccctgggcctctggaagctttgtttcttctgtacccgggtaaagtgggggcctcaactgtgcctcctcaggtggatggaaggttctgggtgcccgcaggggctgggggatgctaggactgagaccctgggtggtgcagcgcctggtgatcttgctgtgtgcctgtgcctggggccttatgttgctctttctatcatttccattctggtggccccactaatgtcttaacctaaaccataattgtaaccagtgcctttcctccccactggagggcaagcccccccacccacccaggatgtcctggctcactccgcaagccccccagcctcccaccctggtcccagtttcccgcaaagtgcctctgggggaccccccagcctcccaccctggtcccaggttccacaagtgcctctggagggccctgggctctggcagatggtcctggtgccccagacgggggccgagggcctgagcccccccatccctcctctgccagggtttcttagcggtttctctgtggatgttttggcatctttagacacctggaaagtctcttatgtttgccgtttattcccttcacagaaggcttggaatgtatttatttatatttattttttcaaaatccgaaatcatttgcgagccgcaatcgtcgtctgcctgtgtgggggggcccagggcctgccttgcacgttgcagcctctctggccattgcagagctgctggcctcctgcccaggtggagggtcctggggacggcagaggataaagccccctcctcacatccctctattgcggatccacagtggccttactcttaacttggatgagagcaaaaacctgggagaatgatgtgcttctgtagtcggtgacaaaggaagaggcattgctactttatttggtgcacttttggtttctaggaaggtctttgggtcattttaacttctcggcaactcccagactctcagagtgtggggctggggcctggcggctgggctggtgcagggagtgtgctggttagtctccagaccctcacagcagccacgcccccaggcccaccgtgcatggtgtgggcgggacagccggaagcttccggggtggcctccacctcctggctggggcacttatgctcccagagcctttggtgccaggtttgtgggatgggggttagcgtctatgtgtggaaggccaccaatctagggacaggagtcctgggtcaagattcacacagccacccttggagctggtttctagttctcacatttagtcaacatctagaaagcgctgcggaaggctctggttctctagggacttgaaggcgccaacagagtagtctccatggtgggcctgtcccagccctggctgcgaggacaggttgtctttctctccccagttggcgagggacacgaaggctgcggccgggctggcagagggcccggcccctggggggaggcactcctccagggctctccctgtccttagccgattttgagggaaccctgtggcacctgtccctggatgaagagctgtcacctctgccttgccctttaactcaacccgcttcccagcacagcggctttctttttaaaacctgtttcactgagaagtttgtttttgggtccgctggtgtcactatggcctgggtgagaggccagcactgctgctgccctgaggggaaacgcctgggccgtgtagtggggacgctctgggaatggtggcggacgggcagcgtgggtgggacctggcacttcgtggtggctgagccatccacccagcagcggcctcctgtagcaccatcttgggaaagtcctgggggacgtgtgtgtcgtgctttttaccatcggtttgacttacagtggagtagaacgagccagagttcctgacttgagcaggtggatttgggcccaggccctgttcactcttgcttctcggtgcggactaatgtcagcttgtggctgggaaagagggatgtgcagtgacgtggtcaccaaggcagtgagccccgctgaccccgggccagcacttggcaggcaggaggtgcggtctccagagtggtgggccagggcgggctggcctccgtcttctatcttcttttcttgcctccctgaccagcagactcacctcccaagaacgcctgcccgcccacccgccttaggactcccgatgcgctcctggaaggccccaggagtggcaccttagtgtgggtcggcccgcagatggcacccaaggccgggaagggcagtaactgcacacgcggcgctgtcagagatgggggtgggggatgcttctgggggccctgcctccccattgtgtgcccagaacatccctggccccaccccgccacttccctcgggcccttatgaaggactgaggctccagggtgagaaggctcacttctgccccgggcactgcgtccagcagcagaggggacagggggcaggtgtgtgactgggttcctgggtacccaggcctgaccagagggagcgggagggcagaggtgaggagggggaagatgtttctgggcctaccaaggttcaacaagagaacggagctgggaatgtgactgctggagcctgagaggtggaggagttctgatcccccgttacttcctagcattttctcctcttgccttaaaagttccctgtatgtgaaacgggaagtcctgagagtgtgtgttggtggctgtgcgcacgcacacaagacgggagtcaccctgtgcttcctgcccaagatactgacccattgaacccccaaagcatctttctctccacaaagtccgtggtgccttcctggtgggctgcagacactaatggtgttggggggtcttggaacagcttctctatgtgtggattcgtgtaaatgcgaagagttcacatataaagaagtgactttgattctgtgattatattgatttggtacacagtaaatgggagtttaaaaaatccaaagactctaatgacttgtaaagactctaatgatttgtatcatgtaatgaactaaaccacctgtaattttgtaccgtatgtgtctttccatcaaatgaccaacagcttctcaataaaaccagaccatttctcacctgc

SEQ ID NO: 15822 - DNA, 923 bp, Homo sapiens
agccgccctgggggccccagaaccagagctggctcccagcaagggtaggacgggccgcatgcgggcagaaagttgggactgagcagctgggagcaggcgaccgagctccttccccatcatttctccttggccaacgacgaggccagccagaatggcaataaggactccgaatacataataaaagcaaacagaacactccaacttagagcaataacggctgccgcagcagccagggaagaccttggtttggtttatgtgtcagtttcacttttccgatagaaatttcttacctcatttttttaagcagtaaggcttgaagtgatgaaacccacagatcctagcaaatgtgcccaaccagctttactaaagggggaggaagggagggcaaagggatgagaagacaagtttcccagaagtgcctggttctgtgtacttgtccctttgttgtcgttgttgtagttaaaggaatttcattttttaaaagaaatcttcgaaggtgtggttttcatttctcagtcaccaacagatgaataattatgcttaataataaagtatttattaagactttcttcagagtatgaaagtacaaaaagtctagttacagtggatttagaatatatttatgttgatgtcaaacagctgagcaccgtagcatgcagatgtcaaggcagttaggaagtaaatggtgtcttgtagatatgtgcaaggtagcatgatgagcaacttgagtttgttgccactgagaagcaggcgggttgggtgggaggaggaagaaagggaagaattaggtttgaattgctttttaaaaaaaaaagaaaagaaaaagacagcatctcactatgttgccaaggctcatcttgagaagcaggcgggttgggtgggaggaggaagaaagggaagaattaggtttgaattgctttttt

SEQ ID NO: 15823 - DNA, 772 bp, Homo sapiens
agtagaaagttggagtcaaacactggatgcagaaattttggatttttcatcactttctctttagaaaaaaagtactacctgttaacaattgggaaaaggggatattcaaaagttctgtggtgttatgtccagtgtagctttttgtattctattatttgaggctaaaagttgatgtgtgacaaaatacttatgtgttgtatgtcagtgtaacatgcagatgtatattgcagtttttgaaagtgatcattactgtggaatgctaaaaatacattaatttctaaaacctgtgatgccctaagaagcattaagaatgaaggtgttgtactaatagaaactaagtacagaaaatttcagttttaggtggttgtagctgatgagttattacctcatagagactataatattctatttggtattatattatttgatgtttgctgttcttcaaacatttaaatcaagctttggactaattatgctaatttgtgagttctgatcacttttgagctctgaagctttgaatcattcagtggtggagatggccttctggtaactgaatattaccttctgtaggaaaaggtagaaaataagcatctagaaggttgttgtgaatgactctgtgctggcaaaaatgcttgaaacctctatatttctttcgttcataagaggtaaaggtcaaatttttcaacaaaagtcttttaataacaaaagcatgcagttctctgtgaaatctcaaatattgttgtaatagtctgtttcaatcttaaaaagaatc

SEQ ID NO: 15824 - DNA, 406 bp, Homo sapiens
ggaacagttttgccctggaacagagttacagatacacaatcaagagtgttcttgctgatgctcggggtctgaagactgtcttcctatctgcttcttgcggctgaggagaggagcagttcagtttacaaaacaagtgcaaattaccaaactcaaagcttatttgagtagaatgggctcatgggcaatgtgatgttccctgttaaccttctgttactccctgggagaaaggcgctgagcgtggcatgcaggtgtctttgctgtgtttttctccacttctaaatggttcctggttcctttcttcctcgtttgttactttagagcaagtttgcccatagtcttgaatgcaatatttgtttattccaaaagaacatatttataataaaatcactgtagaaggatttttaag

SEQ ID NO: 15825 - DNA, 602 bp, Homo sapiens
gaaccaggagacacgtgtggcgggcagtgggacccatagatcttctgaaatgaaacaaataatcacattgacttactgtttgagttttatgtatttctttattttaatcaggatcttctgatagtggaaatttttagtacataatagaacttatttatggagttagaaatttgtagtgttatccaggattgattttcatttgatcacatctcacagtaattaatattttcaagttttttttttattaacagctctgtgctagttttttttttctgttttagcctcatcccaaatataaagctttgtgaagtacaattaacttaatgtacttgaatgaatagaacttgctactttttttttttttttttttgagacagagttttgctctcattgcccaggctggagtgcggtggtgctatttcagctcaccacaacctctgcctcctgggttcaagtgattctcctgccttagcctcccgaatagctggaattacaggcacgcaccaccatgcctgactaattttgtatttttagtagacatggggtttctccatgttggtcaggctggtctcaaactcccaccttcaggtgatccgcccacc

SEQ ID NO: 15826 - DNA, 624 bp, Homo sapiens
atttctcctgggaaacctgcctttgtatgtggaagtatacctggctttttaaaatatatgtatttaaaaacaaaaagcaacagtaatctatgtgtttctgtaacaaattgggatctgtcttggcattaaaccacatcatggaccaaatgtgccatactaatgatgagcatttagcacaatttgagactgaaatttagtacactatgttctaggtcagtctaacagtttgcctgctgtatttatagtaaccattttcctttggactgttcaagcaaaaaaggtaactaactgcttcatctccttttgcgcttatttggaaattttagttatagtgtttaactggcatggattaatagagttggagttttatttttaagaaaaattcacaagctaacttccactaatccattatcctttattttattgaaatgtataattaacttaactgaagaaaaggttcttcttgggagtatgttgtcataacatttaaagagatttcccttcatttaaactaaattactgttttatgttgatctgcatatttctgtatatttgtcatgacagtgcttgcatcctatttggtgtactcagcaaataaacttttcattttaaacaaaaacattc

SEQ ID NO: 15827 - DNA, 1742 bp, Homo sapiens
aaatagtcttctgtctattgaaataagacataacaagtttttccaaatattttttacttatatattttttaacatttagcgatttttaatgtttgtaaatgtggtaggaaatataaatcatatggtcctttgtaaaatatacaaataatctaacacatatcatataggacatcaatttctaacatctgatataccagaattatttccatgcaattataaggggagggtaatatgatcaaagttaagcaatagtggtaaaatctttaaaactagattcttgcttctgatatgtttcaatacattgttgatggcattgtgccatttgagctgaaagcaggattttttttcattagtcatcaaaccaagaattttataattcttgacactttattatataatttacaattctatgccagatatggcaaatttcttcaatttcagtattttatagtttctacttgtaaaatatttttaataagaaaaattggtttgcataatctcagtgtttccttgagtagagatgttttaaatgtttatgttggaagcaattgtagttaattatattggcaatgaagcactttcaatgcctttttctacaagagccatttccagaagattattttgtttttggatttcacaatttaaatagttattttaatgattttctagcaaataatagagaataatgtttatgcttatgcagttagtctttattacagtaatttaaacaatgtggcacaaacatagttttttcatgctcttgtcatagacttttctttttaaccttctgcaaaagtaaaaactctcttagtaataatcatcatagggcaacaggatatagtatgtaactgcagtcttgagctgtctcttttcatgtattacctttcttgctcaacagctattcctgttttctgtaagatcctagtcagacagagccctcacaactggatagacctttctcaagggttagccctaaaatgtgacaagagaattggtttggctgaatcacaacaaataactagcaaagcttcagtgcttttgcaaactttttatgtaagcaaactttttgtgttatctggcacaggcctttgaaaagactataattctactttgtttaatgtagagtaactaatttttcaatttagaaagacagtgagaatccccaggataagcctctttatactcacttaaaccaactgggatggaattcagaatacctaagctgcttctttaacatagagatctttaaaaagggaaggtcaagcaaagaactgtaaccgaaagaagtaagagatttgaaaagacgatagagttaaaacaatatttaaaaaacatttctatttggtccatgcagttttatttgaaaatagtctgtcaaaatcagaactcctgaacaactttgaaagcagtaatattaactggtattcaaaaatgaataacagccaaaaatgaataacagccatttgatttatgtttccctcagtcatttggtttatgtttggttatggcaagatgttacagcatttatagttaatactactactaatatgtaaaccaaaagttaaatattctagttaaggattgtttctttaaacaactttcagattctgttgacattgtctttgtggtatttttatttcatgggttttaatttctcttaaagacttacctaaatattcagttacatttttaaaaaatctgtacgtgacagaatattaaaacatggaatatttttgcttcaa

SEQ ID NO: 15828 - DNA, 897 bp, Homo sapiens
agtgaaattgaactccatcaggcaaaatttaaaatcacaaattggctaaaagtactgatccattatcctttgaagaagtttttcctcttttttggcccgttgttattagtaatacctctagtagttgatacttcaggaagtctgattctcatgttatgttacacatagatcactataattcttacgggaattccaaccttcccagagctaaatagtttagctgcttcaactgctccagactattgaagtatgcaaatcagcacaaaatgtgacattctgacattctaaataccataactaagatttacattgcactatgacataatcccgaaaaaagatacatatacttaaatagaagtgtgactttcccccaaaagtatttcaattctacttcattaaaagctgctaagcttacctgtagggcagttaccacagaaacagaaattgacctccggtatatataaatatttacttataaaagtacaagtagacgtatattgtccgttgaataactgaatataccatcaaaggatcaaatcttattacctaattaaaccttaaaaatataatgtcataatatttcttaagaatactatagtattctataatttcaaactttgtggtaaccctacattttatagttgccatatcaaagccatgggagagttttaattcgttattctaagtttagttacaatcccttctttacctctacttaatgttccatatatttttattgactttccaaagtttcaggaattacttttatgtcacattgagtgggaggcttcatccaatggctttgctatggaaatcttggtggtgtagcttttcatgctaatttaaagattgcaagaggtttcttccccaaaatatatcatggactcaaggtgttat

SEQ ID NO: 15829 - DNA, 788 bp, Homo sapiens
ggaataaatctcttatgttacacctcagaataaaggcattcggtgaaagaaatgaactgaagttcatcatgaatgtaaggcctcagtacttgacattcctccacggaagggaagacaagtatcaacaccactggcatcatttccaaactgatcttatgttgaataatttccaccacattgaagtacctttcgactctatccagtttttgggttttgttttttttaattcatcaagcctttcgttttcaaaccaccatttgtcagccttgaggtagagagacatatagatttgaaaatactttcttaagagatcatgtaactatataactctgaatttaaaaattgaggggggagggataatttcaacccactgcctcttaccagaaacatttttttaaatctgtaactgctttagtgttaacagggtgcaaggtggtttttgtcccgtattgttcttaaaaggttctcatttattgtgattgtattgtactgtatgagaacaaatcataaattgccttgtattgtttataatagaccataccacgtactacttcagtttttatgttccaagtttttcagtgatgcatgttaacagttaggtcctaaaattctgtggtgctaattctcccatacccaatggtgcttttgtggatgctaactgcacacatgctgaacaaagcttgaagtttaaaactttcctcccttcctctgtttatatgaagtaaaatgaaataacttgaatttgtctcaaagtatcactgacaatctaataaacttgtttatatgtg

SEQ ID NO: 15830 - DNA, 1750 bp, Homo sapiens
tttcaaaaatgatcagaatgaaacagactagagccttcttgaggtttattttctaggttgccttaatatttgaacataatagctattctgttgactatccatcaggataataattagttgctgcagtactcataatgagccctttcaaggaatagatgtaaattacccttaggggtagccactatattttttatactaaaaaaggaaatatttcttatggacactggttatcttccatgtccgtgtctgtggacccacatacttactgccttttgtggaaattcacctagagtgagtactttccttgtgcaatggagggagacgatctagctatagattcttgatactcacctcactctcaacagcttattggtatttggcaaacctggtatcctgcagccgagcatgaacatgaaatacattagaacttggcaatgagagatcccatctgttggtttccagggatgtaagtgagtaataaaagctgtttcaagtttatccactatccactcttcaagtgaaaagaacttatgtgtgtctaccttcttctccataccctgagccacctctctcactttctttagttgtgccttgccctatcgcctcccattttcccttcaaagtagaatgtcttgtaaagacacagtaactcctgtgtgttttgattagtgagatgttaccacttaccccttctgctgcgcagaataatattaagaattgctatgcttatgattcaggctggacagcctggacattttgagcagcgcgagagtagaagtgaatacccccaggaactccaattgtgctgaagctgatttgtctgttcgtaggatgatgtgcagcctgtcacagtggcagccacaggcattcagtttgtgggcatttcctgtcatttcggatcctgctatagggaaggttcagctctcctgtctggggcatctactggagcacctcagaagacaaggaggaaaacactggctcatgttttctttccatgtgagggaggggaggtttctagatgatactaaaagcctgttgccactgttgtgtcatgatttccattcttcatcatggaaagccacaagcctcagaaggcagccagaggacaggaagagtctgtgatgctcatgtctgtgtcatggcatgagggggaattgacgagtgcttgcttagcatcagctctcattgtattgaaggctgtgcccttggtgtgcttagcagtgagcagcgtcttcattaggtagctctggctgggctttgtcagccagcgtgtgagaaaggagaaccaaaaccaatacctccttatagaagccagaaggatcacattggatgagagaaggtgtctataactgggttcttcccaatcccagctctttcattaactaaatatgatcttggacatatctcttaacctccatcggccttagtttttgcatccaaaaagaagtgattgggctggtcttggaaggtttttttcttttttttcccctgtgtaacattcttcattgttcatcaacatttaagaaatttaattttgtagatgtttttactaaagagggtaacaaactattttggaactgctgtatgttattcaagggaagcacgctgtttggaggaaggagcatacttaatgggtagtattgaggatgaaagggaatttctctctctgccattttatttgataatattaaagaaataaagactggaaagggggattccttgttaaaggtcagattttaaattgcatata

SEQ ID NO: 15831 - DNA, 210 bp, Homo sapiens
gacttgtattactttcccaagaggaaaggattttcttcccatcccaatttgtatgaatggagttatttaagaaaaaaagatatttttacacgaaactttgtaagtgaaagctgctttttccttccttcctttccttttacctccataagaatagggaaagtagaacaagaaaaaattgaactccttccatttctaaataaagtttgggag

SEQ ID NO: 15832 - DNA, 998 bp, Homo sapiens
gtgctgccgctacaccgagacctggagaagacctcttgcctcatggatgtctggtccctctgcacagctccaaccaacaggactgtagggtgatgacgatcactttcccagtgatgagaagggtggtctaggactgggcttctaccctcagtgcaagaccagtgccagatgtgcccccacttcctgcctcctgaagccttcttccctgctactccatgctggtggcctcacccatcaagaccactgtctcctggtactggactatctacctgccttgtccctgttctgggggaaggtgtccaccccgatcaagaacatggagaaagtcctctttcaaggctcccattaggaggatgagctgccttgacccagaagggatgagacgggctcttacctctctacaaccttccctccccttcccactccttccggagtaaggttagaagggaaggaaggaaagatcaaggaaccaagcgcctccacgggaggcgagggaggctctgtatgaaacagaagagcagggacataaaggaaaatgtcagtgtttacatgggacctatggaaacaaaggctggcgggcgccagctgactccagagtaagagagggcccttcccctgccaggacccacggtgctatccattcagtctcttcctcagttaatctcggagcttcctattccatgttgaggtttgtgggcccctctagaggagggctagttctatacttaaattgattcccaggggccttttttttttttttttttttttttttgatcaaaaggggtgtggggatgggggtgtctacggttaagcaacagatacctccttccctttgtaaatagtatttttatacttcatcctcgcctctcaggctttagatacgaaatctccagaatggaagggggtggggattttctgttcctccctggagtgggtgagggtgggagaaagttacatatttaaagaaaaataaatttaataacaagtttctctaacct

SEQ ID NO: 15833 - DNA, 680 bp, Homo sapiens
ggggagggggagagaggtcaggccaggcccgtgggtaggtccctggctcccagctggagataggaggcccaggtggcaggtagcaggaggcccagatcacccatcctcccctggggtcaggagaggccgagccccaggccactgtcactctttgtgggaggggacggggagtgaggttgggcagtgtggtggatgggcacccaggaagggttgaccagggaaggaggcagctaggctgtagatggaagatggtcctgggattcgaacaccgctgggatctggccagggtgctccctgggattcacagtcccttcccctctttgtgcccaagtgtttccctctctccctcaccaaaacaaaagggccatctctgccctgcacttgtgcagaaagtcagggatacggcaagcatgaatgcaatggtgtagagttgtgtgaaacccctagcatagagacagacagcgaagagatggtgtgaaaagcttgcagaaccagacagagaaccccacagactttccactccaagcacaggaggaggtagctagcgtgtgagggttggcactaggcccacggctgctgcttgggccaaaaacatacagaggtgcatggctggcagtcttgaaattgtcactcgcttactggatccaagcgtctcgaggataaataaagatcatgaaaaa

SEQ ID NO: 15834 - DNA, 603 bp, Homo sapiens
tggatatccactgggagcacttcatcctgttctgacagcttgataacattcctgttataaccaaggatggaagtgtacaccagtccgtaggtattgcttttcttgtttgaaggaaccaagaggggctctgccattagttggaccctgggtcctggagtaaagtcaggagtgcagggatgactataggtaggagagattcccatcccttggtgtgggagagcaagttgcctatgtccatgttctgtgagatggctttcctcatagatggatgggaaaatgtcaggctctttgctgctggtttgaattggacacactgctgcggctcctcctgcaggcctgagggggcttccctctgcttgtggagtggttggcattcccagcagtatcaaccctcagaggagcgggaactggggaattctggccctacgtgcattcacaggcaatgatgggtttgtgtgtatggtgtcatgagatcctctacctcataacaaaaggacagtgggtagactaaggcagtagctcaaagggctttgcaaaattttaatatattaaaacaagaggcatctgctagaaaacattctattgtataaaacccgagttctt

SEQ ID NO: 15835 - DNA, 3943 bp, Homo sapiens
atcagcagaaaaaaaacaccgagacgtttctgtgacttcactttcacctgctccaggggtcaaggacttgccttgcctgataaccagccagcaggctccgaatcaccatctccctcacatgttatccggcaagagtgaattctaccaatggaagccaggttaatgattacaattaatcttttactgtacattcccaaggctttagttttaaatgccactgtgcctttaacaaggttgtaaatattttatgcccaccagagatgtggtcataagatctgatcctgagccagagattcagatggcacaggaagtattcatgtattttaacactggggttttctttctttcatactgagattttttttcagtatgtatcctccagctcttaaagcttacctgagaaagctttaaatgagaaaaggaccatgcgattggtgctgtgttacatacacatactttcttggcttctgagtagctcaggtgtggcttttggctgcagatgttaaattttgataccatgtaaacctacccagcttctcagacttgggtcttgttttttgatgggaacagaggtgtttagagaaagcctctgagtatgcctttcagattttgaacaagcggccttttctaaacatcgacttctactactctctagccttaaaataccttctgcttagatccagggcccttctactggagataggaaaagtagaattcaggaattaaaagaattactctttattcaatttgaggaacttggtgaaagcccctcctcttatgacagccaggttcctgctggctagaccagcctattcagcgctttgctaggggattgggtggtccacgcactcgctaatacagttctccaggtgtggaatgatgtcaatacgattgcttggccttttccccctgtgcctttgctcggtgctctggtttcctcagcaacactccttgtaaggggcagagacagggtccaccaactccccaagatgaagaagccccttcaggccagtcgtggtggctcatgcctgtaatcccagcactttgcaaggccgaggagggtggatcacttgaggtcaggagttcgagaccagcctgaccaacatggcgaaaccccatctctactaaaaatacaaaaattagcttggcatggtggtgcgtgcctgtaatcccagctactcgggaggctggggcaggagaattgcttgaacttgggagatggaggctgcagcgagccaagatcgtgccactgcactccagcctgggcaagagtttttttaagactcttaaaaaaagagcctgggcaatttttttaagactctgtcttaaaaaaaactaaaaagaaaaaaagaagccccttcactctacaggggacaggagaccatggattggaccccaaagggattgaactgcatctgcatgtctgtcctttgaacactttctctccctgcccaaaaggaaacccaaattatttgtgggatactggggaaattgtagtgaagggcttaatgtagttaataaaagttaaaagtcagtagaaaacaggtgcctcagccttcaaatggttgctttttttccattttccctcatgaatagactcaccagcattttacccccttgttataaaactgtgcagagcaagaagatgatacttatttttgaatttgtatttttaaaactagatttatagactttttttttttttaactagggcacttgcttccttcttagctaaaagcaccagctgagatttttcaggtaattttgttgttactcacttaagactggaattagaatgtttctggtatttctcatttttttccctggctatgatagaatctcatctaatcttgacatctctcctaggggaagaatatcacaggctaatagcgtggttgggggtgaagatgatagcagttattaaatcaggaatctcttttatgtgtgtccttgttacattgaggttaagagacaaaatcattggcagtgcaatctctttccaggatttcgtttgctgtggcattggttatatcagagcactttaatctgaaggatgatactgtaacttgatttatctaattagcttttaattatctacagctattttattttatttaattctctcctacagtactgggaccactgtaaacttctcagatgacttgtatttttgtagtgctatgaaatttatttacatacttataaagaaaactgtatgttcacttgaactctgaaaatgtacatgtatggctggacgcggtggctcacgcctgtaatcccagcactttgggaggctgaggcgggtgaatcacttgattgaggtcaggagttcgagaccagcctggccaacatggcaaaaccccgtctctactaaaaaatacagaaattagctgggtgtggtggcagacagctgtaatctcagctgctcgggaggctgaggcacaagaatcgcttgagccagggaggtggaggttgcagtgagctgagatcacatcattgcactccagcctgggcaacgggcgagactctgtctcaaaaaaaagaaagaaagaaaaggtacatgtatatatttgtcctgcattatgttttttacttgatataaatgtatttttactgtgatagtccaagtgccctggggggcaggtgtgctctatgtggttcttcttccattggagagctggcgtagagatctgcagtgttcacaaggatgttggtttggagatgtctgctgctaggacctggggtgtgtgactcagtccatatgagagggacatctgggtggaggagtaaattcctgtgctctgaaatgccacttggtagctctggacaatgaaggacaattgactcaagggtgcctggcttctgctgctgctgggaaaaaattcagtttatagcattcctgcacctcccaaagtagataacctggaggtcattcagttaacaactgtccctgaggactcagttttgggggaggggttatctgggagaagctttagcctgttctgagccattaggagacattagtgaattggagcactggagaatcctacaaatggcctatgtctcagaagagctgggacctccttccagctgctgcagatgctgacaggccctgggaggctgctgtgctctggagaagctggagcagctcatttcttggcctagcctggctgcctcagaaagagcagtcaggacttgagggaagcatcaaattctatacccataaactgcagttggaagtcagctttttgaaatgtccagcctttgcccaattgtttcagatcatctcatgcctcaggctttggcaggtatcctgccctccatcttattccagtgtgttcacctcatcaaggcagcagagtggatgaaggagtaagtctgccctttgccatactgaacagctgtggaccccgattggtgagggctctgcatatgcctgtatgaaggagatacaggtgtgtgtgcacatgccggtatgaagaagacacaggcatgtgcttctcagttttgctaacagtgggagctcaacggggcagagggaggaaggtccatgatgctcagccacatactgtagagagaggcaatttaatgttaaatgacgcaccatcctccctcccacccttctcccagtcaactttttttctttttctagaactactaattatctctcaaggctgaaaaattaattgccttaggtggagaacttaattcctagtatccaccaaacttaactccgtatctccatatggtgtctccatatctactgtgtgagctacttaactgacgccctcttcctccaactgaaggatcgcccaacgtttttggattatagaattattatttcctgctttctttctttgggacttttgaatttctttggtttcgtttttaagaagtaacccaacatttcctacaacactaaataaaatggtacttacctttc

SEQ ID NO: 15836 - DNA, 1220 bp, Homo sapiens
gcctgaaggacaagaagcaacaactctgttgatcagaacctgtggaaaacctctggcctctgttcagaatgagtcccatgggattccccggctgtgacactctaccctccagaacctgacgactgggccatgtgacccaaggagggatccttaccaagtgggttttcaccatcctcttgctctctgtctgagagatgttttctaaaccccagccttgaacttcactcctccctcagtggtagtgtccaggtgccgtggagcagcaggctggctttggtaggggcacccatcacccggcttgcctgtgcagtcagtgagtgcttagggcaaagagagctcccctggttccattccttctgccacccaaaccctgatgagaccttagtgttctccaggctctgtggcccaggctgagagcagcagggtagaaaagaccaagatttggggttttatctctggttcccttattactgctctcaagcagtggcctctctcactttagccatggaatggctccgatctacctcacagcagtgtcagaaggacttcgccagggttttgggagctccagggttcataagaaggtgaaccattagaacagatcccttcttttccttttgcaatcagataaataaatatcactgaatgcagttcatcctcggccccctttccctccgtttgttttcttttcataatccacttactcccttcccttctactctgcgctggcttttgacagaggcagtaaattaggcctaatcctcactcttttcttcctaatcttcatcaaacaaaaaatgaaaagtctgtctggacgaaggggagtgagcttgagcctttgatatcttgctcccccacccttcctgaaactcttgaaatccagttgccattgagtagcaaagccacgctccccacaggacttggacagagggcccacagggggatgggctggctgtggccaggtttagggcagggggcatttgtcccctccatgctataatccagtggtgccttacatggtgtgtgtgtgtgtgtgtgcgtgtgtgtgtgtgtgtgtgtgtctggaggcacaggcacaaagcattgcttgggttggtcaaatgtcttgtgtcataaatatattctgatgtttcccagcctttccacaacctctaccttcccactcaccttccccagctacaaaaatctgtattatcctcttaaagtaaaactggagttac

SEQ ID NO: 15837 - DNA, 1573 bp, Homo sapiens
agaccagcctgctgttcccaactgtgcccagctgcactggtacacacgctcatcaggagaatccctactggaagcctgcaagtctaagatctccatctggtgacagtgggatgggtggggttcgtgtttagagtatgacactaggattcagattggtgaaagtttttagtaccaagaaaacagggatgaggctcttggattaaaaggtaacttcattcactgattagctatgacatgagggttcaggcccctaaaataattgtaaaactttttttctgggcccttatgtacccacctaaaaccatctttaaaatgctagtggctgatatgggtgtgggggatgctaaccacagggcctgagaagtcttgctttatgggctcaagaatgccatgcgctggcagtacatgtgcacaaagcagaatctcagagggtctcctgcagccctctgctcctcccggccgctgcacagcaacaccacagaacaagcagcaccccacagtgggtgccttccagaaatatagtccaagctttctctgtggaaaaagacaaaactcattagtagacatgtttccctattgctttcataggcaccagtcagaataaagaatcataattcacacaaacatcagtctttgttttaatattgtactgttaaaaaaatctatgcagctgggtgcagtggctcacgcctgtaatcccagcattttgggaggctgaggtaggcggatcacaaggtcaggagatcgagaccatcctggccaacatggtgaaaccccgtctctactaaaatacaaaaaattagctgggtgtggtggcgcaaacctgtagtcgtagctacttgggaggctgaggcaggggaatcacttgaaccccggaggcggaggttgtagtgggccgagattgtgccactgcgctccagcgtgggcgacagagtgagactccatctcaaaaaaaaaaaaaaaaaaatctatgctagtagattacaacttcacactagaggagttctggacaaagcttttaattagtcaaactaaattaaggctcattaaaaggaaaggaactactgggaaattatgcaattcaataatttagactctgttaccaggatctttcataaaaatttaatttccataatcataacctaaatgagttcttaaagaattctataagcaatagctgattaatgggccctggaagatgaagattataactgtttatttacctaattaaaaggaaaggcagtgccaaatatgagaggataaacaatattagttaacatttctgttatttatgatgccaattagtagtaagataattccacagctgtcaactttgtttggggctggcaacttctctgcttaaacaggctaaaagtttagtattctgggagaagtggctggaagaaggggtaatatggtgaaagcaaattccctttcccaggagtcaagagaatttatgtgaggtggctcccgcctgtaatctcagcactttgggaggccaaggcaggcaatcacctgagggcaggagaccagcctgactaacatggagaaaccccatctctactaaaaatac

SEQ ID NO: 15838 - DNA, 330 bp, Homo sapiens
tcttttgcccagaggctgttggctcttgaagagtaggggctgtcactgagtgaaagtgacatcctggccacctcacgcatttgatcacagactgtagagttttgaaaagtcacttttatttttaattattttacatatgcaacatgaagaaatcgtgtaggtgggttttttttttaataacaaaatcactgtttaaagaaacagtggcatagactccttcacacatcactgtggcaccagcaactacttctttatattgttcttcatatcccaaattagagtttacagggacagtcttcatttacttgtaaataaaatatgaatctcaaa

SEQ ID NO: 15839 - DNA, 191 bp, Homo sapiens
aaatgggcagatgaatagcaataagtggacctttgttactcttctgagttagaaaaattctaatttagtacactctgaacaaagcttattatacttacttaagatgtgttttgatttggtgttcagaaagcaacctgacaatgataatactgtaactatgataaaattgagaataaaaagattttatttag

SEQ ID NO: 15840 - DNA, 1538 bp, Homo sapiens
gattcctgtacaatttcatcccagaaactccagacttgtagtctccatgcaagatttctttgtcggcggcttgataaacagtttctttgttttcgattttgatttcgccaatcatcattattggcattttcctgcctggtttcttcttcaagactctgaacaattgctttaacagtcaaatgatttttttttttcggtttgagctggatgggtacagcttaaatcatgggtccagcctaaaaaccaccatttaacttacactgatcaatttcaacatggactgtttttggttttttgtttttaaataaagcatcattaatgcacatctgcaggggtttgccaaacagcccaaactgtatacattacaatcattaaaagttcttattttttttaatattagtgccgttatcatggagaacagcatgacagctgtctttggcagtctgtcatttttctagcattttcagaaactcatcggaaatggcggtacctgtgtttcccttcgaaagcctctcagtacagcactcctgttcctctgttaaaactccttgttaatccagtgatcttttaggccaaggaaatattttgtgatggtgttctgggtccatacaccagcaatgaaggagatagatttgtgtacttgtgttttttaatcagcattaacatgggcaggcaccctcatttatagatgtcaggaaacattcagtgaaaaacttgtagaatgggatgtgataacgaggttccagtaatctgagcagtctaacgaggcccacctcctccaccacagaacgtggctatgttccaagtgctactctcactcagcctgttgcggatcttcatggcctcaggagacttgtttctccatgggctcttctggactgcacacttccaccatagcttgctgggttgatctagatgtctgtttgttgtatggaaattttgggggaaaaaatccaaaacacaaactgtgggttgaaatattaaccgtctccttggttccttggtattcaccgtgcctgatctgcacatttcatcgtggctgtttctgtatagcctatactgcattagcccaagagattgttgctttgtaactttttgcactattgttttggctggatttgtattacacacagttttaaaaaaaacaattccacactattctctgccttttttttcctatttatttcttcccgcacaaattccacatagaggccttcccatccagctctacgtgatttggctgcacttgaacactgattgtccatttacagccctcagcaatgtgccttctaaatggcatgacatatgtagatgtgctgcagcgcttgttaatggtcacaataaatgccacttcaccaaggaagtctcagatgaacaattatgaacatccaaattttattggggggcaataatcaactgaattgcaaaatttgggggaaaatggcactatccgtgtacgaatcgaatacaaatcaaagatttgtcacatccctaataaaaacaagatggagatgtctctgcaaccatatttgtaagct

SEQ ID NO: 15841 - DNA, 596 bp, Homo sapiens
atgtgtggtgtcccctcctttctatttaagtgaaaaaagcaaatagatcatgcatttaaaaagaagagactgctacagtgcatacagcctttgccatcggaactgccttattaaagcaaaaatgggaaaccagttcatgcaggcagaagcagttggtggtgtctggtttttgtttgatttggttggtttgggattcttttgtggagggttaaattcccttggtcttttcttgccttttattgtgcttcagtgccattgcagcttgaaaaagaaatgtttttgctgttaaaataagaacaaagagaaaagtaagttttgttaatgagataaatttaaagtctaagatgtgttccttggttgtataaagcaaaagtagccatcattcctttatttattttcatttttaggaatttcaagaagtgtagttcaatagtctaatcaagtgtgtgtgtgttttaagtaggaatctgagaaagccctctaggaaagggtatgataagctttatatacctctttactgagcagtaggtaggctcacttctctttcccttcaaaatgcttttcataggcttagagaagggctctatggaagtatt

SEQ ID NO: 15842 - DNA, 2489 bp, Homo sapiens
ctgccacccacacgccctccccagactccaccgtcagctgtaaccctcacccacagcccctgctgggcccaccacctgtccgtccctgtcccctttcctgctggcaggagccggctgcctaccaggggccttcctgtgtggcctgccttcaccccactcagctcacctctccctccacctcctctccacctgctggtgagaggtgcaaagaggcagatctttgctgccagccacttcatcccctcccagatgttggaccaacacccctccctgccaccaggcactgcctggagggcagggagtgggagccaatgaacaggcatgcaagtgagagcttcctgagctttctcctgtcggtttggtctgttttgccttcacccataagcccctcgcactctggtggcaggtgccttgtcctcagggctacagcagtagggaggtcagtgcttcgtgcctcgattgaaggtgacctctgccccagataggtggtgccagtggcttattaattccgatactagtttgctttgctgaccaaatgcctggtaccagaggatggtgaggcgaaggccaggttgggggcagtgttgtggccctggggcccagccccaaactgggggctctgtatatagctatgaagaaaacacaaagtgtataaatctgagtatatatttacatgtctttttaaaagggtcgttaccagagatttacccatcgggtaagatgctcctggtggctgggaggcatcagttgctatatattaaaaacaaaaaagaaaaaaaaggaaaatgtttttaaaaaggtcatatattttttgctacttttgctgttttatttttttaaattatgttctaaacctattttcagtttaggtccctcaataaaaattgctgctgcttcatttatctatgggctgtatgaaaagggtgggaatgtccactggaaagaagggacacccacgggccctggggctaggtctgtcccgagggcaccgcatgctcccggcgcaggttccttgtaacctcttcttcctaggtcctgcacccagacctcacgacgcacctcctgcctctccgctgcttttggaaagtcagaaaaagaagatgtctgcttcgagggcaggaaccccatccatgcagtagaggcgctgggcagagagtcaaggcccagcagccatcgaccatggatggtttcctccaaggaaaccggtggggttgggctggggagggggcacctacctaggaatagccacggggtagagctacagtgattaagaggaaagcaagggcgcggttgctcacgcctgtaatcccagcactttgggacaccgaggtgggcagatcacttcaggtcaggagtttgagaccagcctggccaacttagtgaaaccccatctctactaaaaatgcaaaaattatccaggcatggtggcacacgcctgtaatcccagctccacaggaggctgaggcagaatcccttgaagctgggaggcggaggttgcagtgagccgagattgcgccattgcactccagcctgggcaacagagaaaacaaaaaggaaaacaaatgatgaaggtctgcagaaactgaaacccagacatgtgtctgccccctctatgtgggcatggttttgccagtgcttctaagtgcaggagaacatgtcacctgaggctagttttgcattcaggtccctggcttcgtttcttgttggtatgcctccccagatcgtccttcctgtatccatgtgaccagactgtatttgttgggactgtcgcagatcttggcttcttacagttcttcctgtccaaactccatcctgtccctcaggaacggggggaaaattctccgaatgtttttggttttttggctgcttggaatttacttctgccacctgctggtcatcactgtcctcactaagtggattctggctcccccgtacctcatggctcaaactaccactcctcagtcgctatattaaagcttatattttgctggattactgctaaatacaaaagaaagttcaatatgttttcatttctgtagggaaaatgggattgctgctttaaatttctgagctagggattttttggcagctgcagtgttggcgactattgtaaaattctctttgtttctctctgtaaatagcacctgctaacattacaatttgtatttatgtttaaagaaggcatcatttggtgaacagaactaggaaatgaatttttagctcttaaaagcatttgctttgagaccgcacaggagtgtctttccttgtaaaacagtgatgataatttctgccttggccctaccttgaagcaatgttgtgtgaagggatgaagaatctaaaagtcttcataagtccttgggagaggtgctagaaaaatataaggcactatcataattacagtgatgtccttgctgttactactcaaatcacccacaaatttccccaaagactgcgctagctgtcaaataaaagacagtgaaattgacctg

SEQ ID NO: 15843 - DNA, 933 bp, Homo sapiens
taagctttgagagcaacgtcactggggctttggggtcagctacacaaggaaggcatttggacccctgccttttcattgcccgaaaccagagcctttccaccaagcgtttcccagtcttagccctgtgtcctgagttacgtacgatctttctggcaaatggggtgcatgataagagcatctcttacgaagagttggaaaaacaaatgccatatataaattctaagccatatgaggacgaggagtaatggcattttcttcctttttcctctcactcccagacattcattgtccctgaatgctccattaatccagggaaggtaattgcctaaatctccagtggatctcgcaacaggaaggaaccagaagctgggaaagttgtttacctctttgtcccagagttagacctcatcctcccctagcttagctgtctcagagatatactggccctcccttctcttctctttgctgctggtgctaaaactgctctgtaggtcattggccactgtctccactcacaacccctgctccagtcctggagggagtgggttaaacacaaatagaacattccatttgaagcagtgattctttttttttttttttttttttaatcaaatgctttggacttttgaagtccacttgttctgtacttgtaaaagggaaagaaggccgggcgcagtggctcacgcctgtaatcccagcactttagatcacttgaggtcaggagtttgagaccagcccggccaacatggtgaaaccccatctctactaaaaatacaaaaattagctgtgcatagtggttggcacctgtagtcccagctactcaggaggctgaggcaagctaactgcttgaacccagaaggcagaggttgcagtgagctgagatcacgccactgcactccagcctgggtgacagagtgagtgagactctgcgtt

SEQ ID NO: 15844 - DNA, 1553 bp, Homo sapiens
gaaccactggccgagaacattcttaggtctgctcttcttttgcccggcccctccctcgcggaggaattccttcttattcctctctgaagagtggctgctgccaaaaaacgtttgtgagatggcctgggttttctttgttgatttatcatttagtttggaagaaatcagaagtctctttaagaagccaatttgaaacattcaccccatgggaacagttctggatgaagtcagaagatctggaggcagcgcagtaacacacgtaggttttctggccatatggacatttcagagaaaacaacgcacagaggcctggagcaggtgaactggcttaagtagagagaaactaagtcatttggggatatttagcacctaatgtcaaggcagaaatgtctaagatgtaattaacagttatattctaatctcaatagtagctaagtacagacttaaacataagcctgtatataacaaaataaccccaggagaaccaaagaaaatctagaagttgctgctaaaaacagttatgttagtgatacctaggaaagttttttttcttttaacatgtcattgtggtttacaaatgaaaattgaggccgggcgtggtggctcacgcctgtaatcccagcacttttggaggccaaggtgggcgaatcacaaggtcaggagttcaagaccagtctggccaacatggtgaaaccccatctttactaaaaatacaaaaaattagctgggcgtggtggtgggcgcctgtaatctcagctactagggaggctgaggaaggagaatcgcttgaacctgggaggcggaggttgcagtgagccaagatcatgccaccgcactccagcctgggcaacagtgtgagactccatctcaaaacaaacaaacaaacaaatgaaacaaatgaaaattgaaacttcacccatttatggctattgcctaaagaatttataaatgcctgggtcattgcaagcatattgctgacatgtctctcggtctgcgttaccctggtggacatcacgacactcacctgacaggcagcagcttccttccagtaaaagcaaagaatctgaaaggaatggaaaaggctccacacagtgccattttatagaaggaaatgcaacaaggtcacagaccagaaggacagcagcccaggccggctgggcatggaggaagtcccaagatgctgctgggcatgaacagacctcctcatacagtgtgcctctgaagaaataatgcaattgtgtggggccagaggagccacaaatagaacaaagggaggaaaggaaaaatcaatatgcagtaaagaggaggaagggagcccggcgcgatgtctgaatctcgctggcaagaaaaggaaacaggtggtctaagcaggcaacccttcaccccacattgtaatgctggggcatggacgtgttccatagatcactcactgagaagtcttcacaagaacactccaaggcagacactactatccatcttccacacactgggggattgagagtcagaaggattatacagcttgttcaaattataaataaaagccctgagatttg

SEQ ID NO: 15845 - DNA, 2523 bp, Homo sapiens
gaagagctgccatcatggcccagggaggcgggtgaaagctccgtcttctgaattcatctctacaggctcaaaactcctctttgatatcagacctgatgttattttccttcttttggagggcatttgtttggttaagaaggcttctttggactttggaatttcaacccagattttaccttgcagacggaatgacaagcaaaaagtgttgtggggaatcaaatttgttcctttcctcatgcacaaaacataaaggatagtggcgagtttacaagctgtggatgggtttccatagtcttcctttctgtacattgctatatcttcagtcctttggagcaagtggacctaacaagttgagcaaaatgaatatttggatccatgttcctcttgtgaccctgagtcttcatgcaaggagatctgaagctgaacaatgaaaatcttcagcagaaatagaaatggccgtggattgtaatacacactgaaattctgactttctgaatttaaatgtagaataaattttaccaacttggagtactgtatgagtattttcagtagggggaataaactcaaaattatatttgttttgcagaaacctagtcatttgaaatgagccatcctattaagccctcttttgtctccattatgttccagaggcagtatatgcagtgcaataattttttcattccacttatgttttgaaagccagcggcatcagatgtgtgagttgagctattcctcctggcagaattgtccaatctaaaaatcagcgtttaccagcccatgctaataaaattaagatttcatacaagtttctgtaaaactattcttcatgattagctctccctgtgggctgcagcagtcagaaagagataacagccacacctctgcattccccggtcaccaggaataaaaggaaatgttccagattgtaagtggttttaaaaactcagttctcatcgtttgcaatctaagttgaaagaactattaaatataaaatcaaaggtgggcaatgtggccaagtcaatggaagaggctttactcagaataacttacaaattctagaaacaaggtagaactcactcagtttacctaataataattgaatttaagaccaaatatcacagttgaaataacttccctggatacattctatcattttgtagctttcctaagaatttcttgctttatcattcctgattaatcactgtttttacattattaaaggtggcaattttctgtaaaaaatttaaaacagatgatcctattctgtcttgaaagttctgtaccacactgaccttaaccttgcttataacataacaattggtaaacttttaattcataatctttataccctaagatagtatttattaaatttttatgggtcatgaagaaactagaccctctccccagaaaaatctacatacacagaatttacatagaacttgggttcatctacacaatttatgcatgaaataaaattgtactggtaccctataaatttatacaaataaaagagtttaagggagttcaaggatgccatatgtatattttaaaaaaatttctaagggaagtctaaaaaacataaattataatattacccaaaataagatgctacttttcacctaaccaagtcctgcctcatttcacactttaacctcctaagtatattcataaccctaccaaaagttgttttctttaaaaaataagaaactttagggccagcgcaatggtgcaagcctgtaatccctgcactttgggaggccgaggcaggtgaatcctttaaggtcaggagttcgagaccagcctggccaacatggtgagacacactcccccacccccgcccagtctctagtaaaaatgcaaaaattagccgggcgtggtggcgtgcacctgtaatcccagctactcgggaggctgaggtaagagaatcacttgaactgaggaggcagagattgcagtgagccgagatcctgccactgcacttcagcctgggcaacagagtgagactctgaccaaaaaagaaattttgcagctccaaggcttgaagtcatttatgttgccaggggtaagagcttggttgaagggctaaaagactagaaactactgaagatgcccttcttactgtcagtaaagctgctggagacaaaagaagttgttctcgctgctagagtggtaatttgagaatcatcagtattcctatgtgacaatccaaaattactggttttcatttgacttgtaaatgacacccatcatccatctgcccacaaacctggccaaatgtgatacaacctgaaaacctgatggactaaaggagtactatttaacaattgattgcctttgcactttattcaggttgtttcttaaattttggtagacagatccatttgtatatgtgtgtgttatatctagtttatggctatagagaaggtttaaaatactacagtgtccttccctcaaggttaaattagaagctgcctgccttttagttgtttcttgcctttaataaaatgttatcagttcccccag

SEQ ID NO: 15846 - DNA, 327 bp, Homo sapiens
tcttctagagtaattatctgtgatggatggacacaaaaaaatggaaagaaaagaatgtacattacctggtttcctgggattcaaacctgcatattgtgattttaatttgaccagaaaatatgatatatatgtataatttcacagataatttacttatttaaaaatgcatgataatgagttttacattacaaatttctgtttttttaaagttatcttacgctatttctgttggttagtagacactaattctgtcagtaggggcatggtataaggaaatatcataatgtaatgaggtggtactatgattaaaagccactgttacatttc

SEQ ID NO: 15847 - DNA, 1629 bp, Homo sapiens
tgaaagcatcaatcaagacataagaacaaaacattagcatttctctgccgtggagaattgcttatcaaccaccagaggaggcttctttcttgaacaataaacatttcttataaggattcacagattcacatacgactgatcttgatttttggaaatgaatgaggtttcttttttctttttcctttttttaattttggggtaagttatgatatttggatggatttttaaattctttcctgataacatatttagcacatgttctaaattataatcctatagcaaacagttggagcattattcaaactgaaagtggaaaaatttaaatttccaatttattctagatttcctcagagcataattattctgttaaatcctcaatgagtgtgatgtaaaccacctctatccagaaatatacattcttttctcatcatgttggacacagttgagggtgacatgcacagaactggaacagatcactattagtggaaaataccaaatggacaaataaataccagtcgttttctccgttctccaagcacaggagccaggtttaccatctgaacaatgaagacgaagggagtaaataaaggaagaattctcatcttttttcctgatcattcaaagaacagtttctcaaggttaagccaagtcctccttgcaagttgccaaataatagcttaggaaaagaattagtctgcctgcatgatgatcttcttaggcaaaaacgtcttcacagcccttgaccttggtgaatttttttccccaaaagcatccaaaagaagaattataaaccccagaatgagatggaaataaacaagtatttttttttatgatgtttggcctgaactgtgggctttaattgggggatactgatcgtttggaaagaagtgagaaaattctgaagaaatggcggccttgggctaggcggggtcccctatttcttctgtttctcactgaagtcctactgctgagccaagactcagtcactctggaaagagcatgaccgataaagaaaacagttcctttctgatggggagcgtctgagtgcagatcatgaggctctttctctaggtttaattcttttccatggtgaccggacttggtgtcttgtagcctggttacgaagtgggacgttgagcttctactgacgatgccctgcatggaccagctgggatctggctggggctgccctgtgtccctaacgaccataggcaatccatcttcttgtgtcagcaatttctggacacccactgttttccaccaagagctgaggtggcaacaactcagtgagcaataaacaaaatgacacagaaatgcacagtgttgttatgaaggagcctgtttacctgtgttcaaaatctggcaccattcccttgagcagggcccgctcaggagggaccaggtctgccagtttctgtgcctgcagagagacgaagccccacgagccacaccctactctacaagaggaaagggggttggatgggaagaatctattttgctgttttggaaagcacacagccgacctacaaacctcctgtgatggtgtttcttcggatgtgtaaaataaggctttatttgtcaattccgctgtaaaataagcattgtccgagtaaaaacagcagcaacaac

SEQ ID NO: 15848 - DNA, 3207 bp, Homo sapiens
ttctcccgggggcagggtggggagggagcctcgggtggggtgggagcgggggggacagtgccccgggaacccggtgggtcacacacacgcactgcgcctgtcagtagtggacattgtaatccagtcggcttgttcttgcagcattcccgctcccttccctccatagccacgctccaaaccccagggtagccatggccgggtaaagcaagggccatttagattaggaaggtttttaagatccgcaatgtggagcagcagccactgcacaggaggaggtgacaaaccatttccaacagcaacacagccactaaaacacaaaaagggggattgggcggaaagtgagagccagcagcaaaaactacattttgcaacttgttggtgtggatctattggctgatctatgcctttcaactagaaaattctaatgattggcaagtcacgttgttttcaggtccagagtagtttctttctgtctgctttaaatggaaacagactcataccacacttacaattaaggtcaagcccagaaagtgataagtgcagggaggaaaagtgcaagtccattatgtaatagtgacagcaaagggaccaggggagaggcattgccttctctgcccacagtctttccgtgtgattgtctttgaatctgaatcagccagtctcagatgccccaaagtttcggttcctatgagcccggggcatgatctgatccccaagacatgtggaggggcagcctgtgcctgcctttgtgtcagaaaaaggaaaccacagtgagcctgagagagacggcgattttcgggctgagaaggcagtagttttcaaaacacatagttaaaaaagaaacaaatgaaaaaaattttagaacagtccagcaaattgctagtcagggtgaattgtgaaattgggtgaagagcttaggattctaatctcatgttttttccttttcacatttttaaaagaacaatgacaaacacccacttatttttcaaggttttaaaacagtctacattgagcatttgaaaggtgtgctagaacaaggtctcctgatccgtccgaggctgcttcccagaggagcagctctccccaggcatttgccaagggaggcggatttccctggtagtgtagctgtgtggctttccttcctgaagagtccgtggttgccctagaacctaacaccccctagcaaaactcacagagctttccgtttttttctttcctgtaaagaaacatttcctttgaacttgattgcctatggatcaaagaaattcagaacagcctgcctgtccccccgcactttttacatatatttgtttcatttctgcagatggaaagttgacatgggtggggtgtccccatccagcgagagagtttcaaaagcaaaacatctctgcagtttttcccaagtaccctgagatacttcccaaagcccttatgtttaatcagcgatgtatataagccagttcacttagacaactttacccttcttgtccaatgtacaggaagtagttctaaaaaaaatgcatattaatttcttcccccaaagccggattcttaattctctgcaacactttgaggacatttatgattgtccctctgggccaatgcttatacccagtgaggatgctgcagtgaggctgtaaagtggccccctgcggccctagcctgacccggaggaaaggatggtagattctgttaactcttgaagactccagtatgaaaatcagcatgcccgcctagttacctaccggagagttatcctgataaattaacctctcacagttagtgatcctgtccttttaacaccttttttgtggggttctctctgacctttcatcgtaaagtgctggggaccttaagtgatttgcctgtaattttggatgattaaaaaatgtgtatatatattagctaattagaaatattctacttctctgttgtcaaactgaaattcagagcaagttcctgagtgcgtggatctgggtcttagttctggttgattcactcaagagttcagtgctcatacgtatctgctcattttgacaaagtgcctcatgcaaccgggccctctctctgcggcagagtccttagtggaggggtttacctggaacattagtagttaccacagaatacggaagagcaggtgactgtgctgtgcagctctctaaatgggaattctcaggtaggaagcaacagcttcagaaagagctcaaaataaattggaaatgtgaatcgcagctgtgggttttaccaccgtctgtctcagagtcccaggaccttgagtgtcattagttactttattgaaggttttagacccatagcagctttgtctctgtcacatcagcaatttcagaaccaaaagggaggctctctgtaggcacagagctgcactatcacgagcctttgtttttctccacaaagtatctaacaaaaccaatgtgcagactgattggcctggtcattggtctccgagagaggaggtttgcctgtgatttcctaattatcgctagggccaaggtgggatttgtaaagctttacaataatcattctggatagagtcctgggaggtccttggcagaactcagttaaatctttgaagaatatttgtagttatcttagaagatagcatgggaggtgaggattccaaaaacattttatttttaaaatatcctgtgtaacacttggctcttggtacctgtgggttagcatcaagttctccccagggtagaattcaatcagagctccagtttgcatttggatgtgtaaattacagtaatcccatttcccaaacctaaaatctgtttttctcatcagactctgagtaactggttgctgtgtcataacttcatagatgcaggaggctcaggtgatctgtttgaggagagcaccctaggcagcctgcagggaataacatactggccgttctgacctgttgccagcagatacacaggacatggatgaaattcccgtttcctctagtttcttcctgtagtactcctcttttagatcctaagtctcttacaaaagctttgaatactgtgaaaatgttttacattccatttcatttgtgttgtttttttaactgcattttaccagatgttttgatgttatcgcttatgttaatagtaattcccgtacgtgttcattttattttcatgctttttcagccatgtatcaatattcacttgactaaaatcactcaattaatcaatg

SEQ ID NO: 15849 - DNA, 139 bp, Homo sapiens
cgcccgccgtccaggcccgggatcctggctgcagcctgcggggggacgccgaggagcctaccttcccctccccttccccacgctcctgggggcgcagggactgagtctttctttggatgaggggcgcgtggaggaggag

SEQ ID NO: 15850 - DNA, 2529 bp, Homo sapiens
gatcacacctcgacacccaacccctgaaccccacacactctgccatgcacacaggaggagagctggacctgagggccaccgcagcggtgcacacattcctctgggctgacggcatgacctctgtaagggactcctgctagtcccctcttggcatgaatgactgactgtagacgcatgacctccaggcttcaatcctgcctcttgcaatgacagctgatctgtcggaaccaggacacaaaagcagcaagaagcggggagagagagggatagaaaacaagcgcaggagagcctgcgaacgcaaaagtgaatgagggctttttgtggctggggatgggttttggttttggggttttttttttaaattgttttgacttcgtacagggtactttttcccaacctcatctgtcagaaatccatgtgggcttcctggaaagaaaaaaaaaaaaaagaaaactaggcatgaaatcagtttaacaccttaatcttaagccatgtcctcatctgcccaccctccccaacccacatacctccattccacttgtgacaccccctcgactccctggtgacgctcctcccagatcgctctacatgacattcaggacacacacacacacacacacacaccactcgcctccactgaatctacacacagattttactgtgacttctgaagctgtatagactctgctgtggataaattggaattttttatgttgtctctctctctgccaatttcaatacgaatcatcttccaatggaaaatcattaccttgaagagtgcattcggggttccttgtgttagggacttaagaatctgaggcgaggacccccaggcttacctgtaggactcaaagggagccaggaccccatctgaaagggtctcctctctcagttgggggacaggccggtggctgacccaggattgcaccagcatgtccatagagaagaggttttctatgtcttcaagcactatatcatagtccgtgttcaaagtgtaaactgtacagtaatcagccttgtgtatatgaaaaacaataaatactatgcaaaccaatagaaacatttagcagtacgtacagagcctgacagcgcagctcctgaggacttctgcggctgcaggagaaggagctgtggcctgtctttcagtgaaagaggaaggaaaggagtagggctagtgaatgtatctgccaggtcttagaagtcaggaccacccagggtctcccagagtgaacttggtgctctaagtccaggcagcctgcaggctggggaccctgggtgcaggtgccaggctcgaggctgttccctgtcctgcctcagtgcctcccctctgcccagcccctgtggcctcttggagaggcgagccagggggctccccggaccgcatggccggtgagagtagagtcggaggcggagagcctggacgcccagaggccggggccaggctctgggtcaaggcaggaaggagacagacagctggcagttcctcgcctcggtgccatcagggaggagccttaagttccactagagcctccggcccagggaggccagaatcagcacaatcccggccccgccctcgcggcgggcgcccccagggccaggagagagagacagggctggctcctctcgcccctggagccgcggtgtggacggcccggccccgtccgccccgccgctctgcgggagtgtcctcgggacacacttaaaccttccaagtagcacagaagccccctccacgtcagaggccccctggccgcggggcctgtgagcggagaggggccctgcttcccacacaaatccgccccggtgcacccccggccaggcaggccccggggcggcctaggcgccttgtcggccgggggtggggctgcttttgcttcctttagaggggcgggcagggagaggaagctctagctccgggcctgagtttccccgaggctgcgtcggaggagctgcagggcgagcccggacggctgccgtctccgccagaggccaccccggcccggcctccagggcgcagaggcgcccccctccatcctcccccatcccgggggccacggcaggggggccgcacagcgcggctgggaccgattcggtgacggcccaaggaagctgggctcagggctcgcctctcccgcctcgatcctgcaccttcctctcccaggtcgctgctgcagccaacccagtagcccccttagcgcccccgcggaccccgcagctccagactccgctttggcacctctgctccggctggcatggctgcacgctccggctgctagtaggagccgttaggggaggagtttggggtctccacacgatgcctagagaatgctgcagtctgcacattagacgctttttagaagttttgaaattaccttgatttttttaattgttatgaaaatggatcttttcttgactctcccacatgctctgttatgggagagaatcccctaccctactctgatgtatagaccattctcccttcaccagccgaaccaatgtcaaaattaataaagaaatggactaatggca

SEQ ID NO: 15851 - DNA, 2726 bp, Homo sapiens
gcaagatgaacttgcaatcaaaaacttaaatatatataaataaaggaaccttttatactgacaaaccagagaaaaatggacctttttccagttaaaatattgctgtagatttagaggaatttttctttggtttattttattttttagaaaacctgatcttctctttttttgggttcattttgttctgggttttggttttcttcacaatcttgaacattttacagtagaactcatctaaaaatggatttggggatggggaaacatgcacaaaatcttttcataattaaaaagagccttactttctttacataccacatggacagaatttgtgtaaaagtgaattatctttattttaaaatgtatgtttcccctcactgtttgcagctcccaatgttgtcatttttaaatgttatatacatctcaagggttaaccagaccctttcctccaaacccaacctttcatttcctacttcattccagcaggaggcacttaggggagactcggatggggacatggagaacaacccaagctccttaaacttattattattgttaatattattattattattattaataaagtgaggcaggaaaatgcttctccttttaaaatcccctccactcctcacacacacacacctcttgaaacccttccccaagaatgtttctttatagacggacttcattgaaatctttgttgttcttgaatcaagtgtaatataatttttttcttcttttttaaaatattcccactcagcactcagagacacaaaaatactgtaagtctcaattaacagcagaatctcagagaaaagctgtttgcaatccaaatccagcctttggaggaatagagatggtcaattaacaatcaaaaagaggagattaacctcttgtttttttaccacctggtgaatcagccataacgcacacacacgccacccagcctcttgtttctagtatgtactttgaaatgctaactgagggtcttgatgcttgagcctttgactgataaaactcaaatagcagtccccagtgatttgcctcttaggttctttcttaaattgttggtggatgactgtacattttagtgatttgaaaaataactgacaaaccattgaaacagtttattttatgttggaagagatggcgcagatgtgtgtcagaagggagatcacggtgtgagtttcgtagctatttaagtgatacatacctctagtttttgtatgtcttttgagatcctgagttcatcccctgtgaatcagagtgcacaagcacctctcctgtgagtggctaatgagaagagggacagaccgaccaccagcacagtagggcagatctggacagcagaatgttataacgcaagttcatgtgttgctcccaactccattctcttttctctcgtgcaaccagtttgcccattctcttcctattacttgctccagggataggtaaaaaaaaaaaaaaaaaaaaaaaaaatatatatatatatatatacacacacacacacacacacacacacacatatatatatatatatattccatcattagaagatggaaactattataccacttggtatgtgcagtcaaatatccaaaagggggaagtactgcttagagaaatatctgtaagcattaaattctctcctttatttgtacattttatatagataaatttttaaagtactaattaggcattaacttttttcaaatgcacaggtttgttggtttttttaatacactttaattgactttctcaagcgtgctaggtagaaacgcagaattccacatcttcccgctctcagctctgagcatgtgcaaggctgtgtaggacccagtttctctgtatatactattccagttcccagtcatctatgtagaaagtgcactgtgctgccatcgccctacatcttcagctgtgtcattgcttcctggttggggtggggacggggtgggtcgggagggaggtatattgggaggagggtgggtcaaggcagaaggagaagctgttgaaatgagggccgtgaaatcagtttctgttggtttgcggttgtgtttggttttgtttgtttctttataaaaaattcaatcgggcagctcccttttccacaagcctctttgtgactgtagaactattgtagaaaaaaaaagttcttttctatattataaaagaaattatccaacacagtaatattggtacctgtcattttttcacttctgtttaaaaaaaatgtatttttagcaagataacttgggtaatcttctaaaaaagaaatttaaaaactcactgttagtgactttgatgccttttaaaataagagctttttcatttcattccatctttaaaattttttatctttgttgtagaatattaaaaactattttaagaaagataaattctctttaaagagatctctagcgtgtgtgaatagagctccagatgcctctaaaagccgcatgtacaaaggaagccacgtctatcctgtctgtttatatttgcttttcctgttttgtaacctctttgtactttgttcatggtgacttgtaagctaaggggaaggggtgcctagatgcctttgtatctctccatgtcacgcgctcctgggccagccggcctcccttcctctccttgtatgtaatacctttttttcccctttctagcaagtactttcaaaagaactctgtacattttaacataaaaaataaattatgttgagccattttgga

SEQ ID NO: 15852 - DNA, 1326 bp, Homo sapiens
tttgtcttcttccagctgcaaacagctaaagggatggtctggtgttggcgtgtgggagacatgtgtgctcgtgccgcacatacacatcctggccgtgcacggctctctcatgaccagctctctgcctcccttccaggaggctccatcccacactgttcacccaggctgcggagactcaccttcccgagctaacttaactactgtacataataatatgtattaaactggtatcgtggtgatataatgtggtgcagttacttatatattaaatatctattgtatccatagaataggcagcattatttcaaacatattcaagttgggagtggagatcattgcctagaagtcaatattcaataaatcttgtacataactatttcgatggcaaatgttaagccttctaaaaggaaagtgtagattggaaaatgattttttttccaaatgatgtttttgccttctaatatactgtaaggtaatgagcttcagaacaggcaacctgaccctgcagaggtcgcgtgctgtgggatgacagcgggacgggagctcacaagtgctttcactgaagatttgttcatatactgtgtattgattgttgtgtaatatatcatcattgcttttgtaaatacgtaaaactgtaattttttaatggtgtgcttcccttatacttttttgatcagagaattttggaaagtaccaaagaagcaggggaatcattggccagtgttacgttttcacattgtctgtctcccaccctcactgatcacgcctgccccagagcagtgtgtggcggtgacaccgtcacccagcatgcgccacgccgtggctcccaccagcagtgccaccgccaccacaccccagatcccacccaccttgcagtggcctttccttgtcatcagagtagagaatgcacaggtgttggtgagggcgtgtggctgagcactacatgtcaagtccagagtcagtttctatcccaattctccctgcagcctgaagaacggatccttgtctccaatgtcagcacaaaggaggctttttctgtgctttgacattctagcacttcagggatgagagggagggagaatcctggatgctggatggagtatttctctgaggcccacacaaagctggacacccccaggctctactccatcccattggagtctcttctttttttgatagcgggagggaggaagtacgactaatgttggagcctgaaactatggaaatgctgctaaaatttttatattgacaaacattttcttggtacttcattgtcatttttcattaatcaaccatattaaatttataataaaaaatgcccctcag

SEQ ID NO: 15853 - DNA, 1275 bp, Homo sapiens
ccaggaacacccgactcctcaaaagcaaatgagatcccgcctcttcttcttcagaagacactgcaaaggcgcagtgcttctctacagacttctccagacccaccacaccgcagaagcgggacgagaccctacaggagagggaagagtgcattttcccagatacttcccattttggaagttttcaggacttggtctgatttcaggatactctgtcagatgggaagacatgaatgcacactagcctctccaggaatgcctcctccctgggcagaaagtggccatgccaccctgttttcagctaaagcccaacctcctgacctgtcaccgtgagcagctttggaaacaggaccacaaaaatgaaagcatgtctcaatagtaaaagataacaagatctttcaggaaagacggattgcattagaaatagacagtatatttatagtcacaagagcccagcagggcctcaaagttggggcaggctggctggcccgtcatgttcctcaaaagcacccttgacgtcaagtctccttcccctttccccactccctggctctcagaaggtattccttttgtgtacagtgtgtaaagtgtaaatcctttttctttataaactttagagtagcatgagagaattgtatcatttgaacaactaggcttcagcatatttatagcaatccatgttagtttttactttctgttgccacaaccctgttttatactgtacttaataaattcagatatatttttcacagtttttccaaaatcagagtggaatggttttgttatagatgctgtatcccactctttattcatgttcacattttaaaatcatttggaattctgcttcactcgcttaacatatacacaacacctgtaacatacaaggcaatgggctaggtgctccagaccgggaaaaggagggacaggaatgcttggtctgatgggctaatatggcatttagagaagtaccaaggtacagtggagccggtcacaaaagggcagacttgtagtagaattcagttgcaagagggattggggaatcttaaggaaaaaatagaatcttaaggaaaaaataactgggtgagacgtggactgtggacaggtgtggaaaaggcactctccatggaggtatgaatatgtagagggccaagagaggggagtacagggagaaatgagttgagcttgtctgaagtgaacttcaggaagaggaacataggctggaatttagattatgggggctctgaacaccaaactgagtttggacttaattgacttctg

SEQ ID NO: 15854 - DNA, 31 bp, Homo sapiens
atatttcaaaataaagaagaatccacattgc

SEQ ID NO: 15855 - DNA, 541 bp, Homo sapiens
aatgtattttcttttatgttcagaaatttacagacaccatatttgttctgcattccctgccacaaggaaaggaaagcaaaggcttcccacccaagtcccccatctgctaaaactgatggctacatggaaaaagaggactttcttgcacattaggaagcagaatatcctccagtgtagcacagggggagaagtgagaagtgttatgacattagtgccctgattgggcagcacccacggctacagtatcaggtcaggtttctcgtgtctgtgtgtttggcttctaaagacaagaatgacttacaatacagcctaattatgtaattaacatcaagccacactaaaaagttctgctgtacctccagtggatgctgtttctcagtattatgacatgtgacaggtgaactctgggaattggaccatgcaacatttgtgaactgtttgcaacactttgtgaactattgcatccttgatttcttgtgcatgtctctgtaatgtaactcaccctcctcagcattatttgatacactgattgttagtttta

SEQ ID NO: 15856 - DNA, 1571 bp, Homo sapiens
tgccgcctcttcagacccctgttaatctctcagttttctgtgaccacaactatactgtggaggatacaatgcaccagcggaaaaggattcatcagctagaacagcaagttgaaaaactcagaaagaagctcaagaccgcacagcagcgatgcagaaggcaagaacggcagcttgaaaaattaaaggaggttgttcacttccagaaagagaaagacgacgtatcagaaagaggttatgtgattctaccaaatgactactttgaaatagttgaagtaccagcataaaaaaatgaaatgtgtattgatttctaatggggcaataccacatatcctcctctagcctgtaaaggagtttcatttaaaaaaataacatttgattacttatataaaaacagttcagaatatttttttaaaaaaaattctatatatactgtaaaattataaatttttttgtttgtaatttcaggttttttacattttaacaaaatattttaaaagttataaactaacctcagacctctaatgtaagttggtttcaagattggggattttggggtttttttttagtatttatagaaataatgtaaaaataaaaagtaaagagaatgagaacagtgtggtaaaagggtgatttcagtttaaaacttaaaattagtactgttttattgagagaatttagttatattttaaatcagaagtatgggtcagatcatgggacataacttcttagaatatatatatacatatgtacatattctcatatgtaaagtcacaaggttcatttatctttctgaatcagttatcaaagataaattggcaagtcagtacttaagaaaaaagatttgattatcatcacagcagaaaaaagtcattgcatatctgatcaataacttcagattctaagagtggattttttttttttacatgggctcctattttttcccctactgtcttgcattataaaattagaagtgtattttcagtggaagaaacatttttcaataaataaagtaaggcattgtcatcaatgaagtaattaaaactgggacctgatctatgatacgcttttttctttcattacaccctagctgaaggacatccagttccccagctgtagttatgtatctgccttcaagtctctgacaaatgtgctgtgttagtagagtttgatttgtatcatatgataatcttgcacttgactgagttgggacaaggcttcacataaaaaattatttcttcacttttaacacaagttagaaattatatcccatttagttaagtgcgtgatttatattcagaacaacctactatgtagcgtttattttactgaatgtggagatttaaacactgaggtttctgttcaaactgtgagttctgttctttgtgagaaattttacatatattggaagtgaaaatatgttctgagtaaacaaatattgctatgggagttatctttttagatttagaataactgttccaatgataattattacttttatatttcaaagtacactaagatcgttgaagagcaatagaacctttaagacagtattaaaggtgtgaaacaatggc

SEQ ID NO: 15857 - DNA, 911 bp, Homo sapiens
aaaagaaaacaaaactgagtttactaggatatctgagctaatgtagaacatcaaacagaaggacccatggcagtataaagcaatgaagcaatggagtattatctcacaaatataaaaccactataagacaaacatttgattatcatttgacaaatacctaggtataactggaattttcatgtttgaagttctaatattaagtttagaattataatgatctacagttgtatcttgattctatgttgtctggaaaaaatatggaattatataaaaagggatgcttttatatatttttcttttccccagaattacttagattaattagatgtatagtaaaatattgttaaatgtcagtttatccatcttatccttctcagcaggtacctatatgataatatatagctgtgaaactcatctaaatatttttgttccaataaaatattatatactattggggaaaattcagtatttcttttagtgctagctaagttttgtgcatttggagcagttctgccttttcattctggtataattaattatttgctatcagctgaaactgaaagaagaaacttgaacttcatacttcgatatcatattctagtttacagaacacattttaatcaatagaagaattaagatgaaaaacatggccgggcggggtggctcacgcctgtaatcctagcactttgggaggctgaggcgggtagatcacaaggtcaggagatcaggaccatcctggctaacatggtgaaaccccgtctctactaaaaatacaaaaaattagccaggcgtggtggcaggcgcctgtagtcccagctactcgggaggctgaggcagaagaatggcgtaaacccaggaggtggattgcgccactgcactccagcctgggcaacagagtgagactccctctc

SEQ ID NO: 15858 - DNA, 397 bp, Homo sapiens
cgcgcggccggggcgggagagactcagcaacgacccatacctcagacccgacggcccggagcggagcgcgccctgccctggcgcagccagagccgccgggtgcccgctgcagtttcttgggacataggagcgcaaagaagctacagcctggacttaccaccactaaactgcgagagaagctaaacgtgtttattttcccttaaattatttttgtaatggtagctttttctacatcttactcctgttgatgcagctaaggtacatttgtaaaaagaaaaaaaaccagacttttcagacaaaccctttgtattgtagataagaggaaaagactgagcatgctcacttttttatattaatttttacagtatttgtaagaataaagcagcatttgaaatcg

SEQ ID NO: 15859 - DNA, 1064 bp, Homo sapiens
ggtctgtgggagtctgcagatagaaagcattacattgtttaaagaatctactatactttggttggcagcattccatgagctgattttcctgaaacactaaagagaaatgtcttttgtgctacagtttcgtagcatgagtttaaatcaagattatgatgagtaaatgtgtatgggttaaatcaaagataaggttatagtaacatcaaagattaggtgaggtttatagaaagatagatatccaggcttaccaaagtattaagtcaagaatataatatgtgatcagctttcaaagcatttacaagtgctgcaagttagtgaaacagctgtctccgtaaatggaggaaatgtggggaagccttggaatgcccttctggttctggcacattggaaagcacactcagaaggcttcatcaccaagattttgggagagtaaagctaagtatagttgatgtaacattgtagaagcagcataggaacaataagaacaataggtaaagctataattatggcttatatttagaaatgactgcatttgatattttaggatatttttctaggttttttcctttcattttattctcttctagttttgacattttatgatagatttgctctctagaaggaaacgtctttatttaggagggcaaaaattttggtcatagcattcacttttgctattccaatctacaactggaagatacataaaagtgctttgcattgaatttgggataacttcaaaaatcccatggttgttgttagggatagtactaagcatttcagttccaggagaataaaagaaattcctatttgaaatgaattcctcatttggaggaaaaaaagcatgcattctagcacaacaagatgaaattatggaatacaaaagtggctccttcccatgtgcagtccctgtccccccccgccagtcctccacacccaaactgtttctgattggcttttagctttttgttgtttttttttttccttctaacacttgtatttggaggctcttctgtgattttgagaagtatactcttgagtgtttaataaagtttttttccaaaagt

SEQ ID NO: 15860 - DNA, 1326 bp, Homo sapiens
ataactaaatgtctatattgtctcaagtgagtaaaaaaggaggcacacacatattgcttattttttctacttagttcagaaaaatgatgttgaattgtgtgtttcagggtgaagatgaggttcacttacatatatcatttaacatcagtgtaagatgcaattaaaatagatggaagacaagaagtcccttattagatgatgggtttggcaagacagttaacttttctacagatgttttatcacatagactatctgtcgaagcacataactggcataaaacctttgggttcattaaatgaatagagagattacataattatgaattgttaatacaaatattctgcatgtcaaaaagaagctgggtgtacactgaaaaatcattgaaactactggatttcctttgaaacaaataatgaagatggcatcaaaagaataagagtattctattgagcattgaaacgcctttctggtaggcattgagggagatctagagagatgaaagatacatggaaatcatattatattgaaatataatatgatttgcattattgtttgaggctttggctaaataacgttactgattgtaagcacctgaaggcaagggttttatccaccacatctttgtctgccatagcatttagtcctctgcatacaatgggctgtccataattactgtagattggactgaaaatcaaaaagtaccacaagataaatgcaaactcttggtgagcagagggagaacatgtactgagtttcttaggtttcatggctaatgcattggcacagctttcagtgtatccctgcagtccttccagatagtccctgccccatgcattgcagatggttgccaaagcccccctctgtcctggcacccagtgttcctccatcctgactccacgtattgcccccttgccactgcctgagtgcaccatagtgtccccatccccccactgcctggagttccccttgtgtacccccttatcagggcacgacctaactgtgccctgctggctgtgacctcctgaagacagacctggcttctccctgcatccagttccccagtatgtgctgtgggcatcctgagaagcctgaaaaagacagggccaggttaggcttgggtgagctgctttctgccttcttggtacacacagtaagcagtggagaggcgtgttacaccgtatctgttctatcctcatctaaatactgagaggctagttgggatagtaaatctttcttactacatatgcattaagtttaagtaaaatagaatattgtgtgaaaaaatgcactgttactaataaatggaataaacagatccatgaaata

SEQ ID NO: 15861 - DNA, 1123 bp, Homo sapiens
gtgacgcaatcaatgtttactcgaacagaatgcatttcttcactccgaagccaaatgacaaataaagtccaaaggcattttctcctgtgctgaccaaccaaataatatgtatagacacacacacatatgcacacacacacacacacacccacagagagagagctgcaagagcatggaattcatgtgtttaaagataatcctttccatgtgaagtttaaaattactatatatttgctgatggctagattgagagaataaaagacagtaacctttctcttcaaagataaaatgaaaagcacattgcatcttttcttcctaaaaaaatgcaaagatttacattgctgccaaatcatttcaactgaaaagaacagtattgctttgtaatagagtctgtaataggatttcccataggaagagatctgccagacgcgaactcaggtgccttaaaaagtattccaagtttactccattacatgtcggttgtctggttgccattgttgaactaaagcctttttttgattacctgtagtgctttaaagtatatttttaaaagggaggaaaaaaataacaagaacaaaacacaggagaatgtattaaaagtatttttgttttgttttgtttttgccaattaacagtatgtgccttgggggaggagggaaagattagctttgaacattcctggcgcatgctccattgtcttactattttaaaacattttaataatttttgaaaattaattaaagatgggaataagtgcaaaagaggattcttacaaattcattaatgtacttaaactatttcaaatgcataccacaaatgcaataatacaataccccttccaagtgcctttttaaattgtatagttgatgagtcaatgtaaatttgtgtttatttttatatgattgaatgagttctgtatgaaactgagatgttgtctatagctatgtctataaacaacctgaagacttgtgaaatcaatgtttcttttttaaaaaacaattttcaagttttttttacaataaacagttttgatttaaaatctcgtttgtatactattttcagagactttacttgcttcatgattagtaccaaaccactgtacaaagaattgtttgttaacaag

SEQ ID NO: 15862 - DNA, 314 bp, Homo sapiens
taaaagttttgtgctgttgagccccaaatgggaaatttctcaggaagagacatttaggacttcagaacttttaacttgtagtcacattgttgatatggaaaccactgacttaagcaacttagttcatctaatcttacatatacttacgatcttttattttttcattttctaacataccttgaaataattcaaaactaaaagcaataaagtgcatatgaagtgtttgatcataagaaatatttcttactgtaagctgtcagttttatatgccacacctggaaataaaaagaatatcatggaatatttaaaaaata

SEQ ID NO: 15863 - DNA, 2762 bp, Homo sapiens
cttagatcaagaagaaaaatgcctactgataattcctttagtcttgaaaatgtagcatttgttaggagttaaaagagagaattatttctttcatcagagcaaattatagtggaaaaaaaatcacttgtttctgtcagtaacacaaatgatgtattcagtgaataaaagaatcccttttataaaatctatttttctttaaatcttggaaaaatgttgttttagctcagagtgatttcaaagtggaatgcaacagtagtcaagacttgtgtactataaatccttttctgattccttacagatttgtagtgatgaggtttagatttaattttatatatggtttaaataattgttaagcttatataacctgatctgaattgcagttgtttgcatttcctctatgaaaacttcatttatctaataaggaagtcaaatgctttgtagactatttaccttacttttgttgcaatcactgttgttgggttgctgtatatatattccgggcaatatatgagtgcaataacaatacaagatattgaataatttagctttaaaaaatcccacaaattttatgaaattttacagccctgctacttttgcttttgaatctcttgccaaaagacatgggtaaaatatctgcctctctcatagagattttaagagcacagcaagtgaattattaaaacaaagtctatacttaatacaactctttatatggaccctttacattttcagtatttaaaaaaatgaggttatcttaactctatagaattttaaaagtatatttagaattgttttttctgtagttcactgtataaagtatttggttttttaaaaaaagcaaaaccattgttatgtgtgactcttgataggacacagaacgagtgaatgagcatgagtgaggccactttcttggatggctgtaagtagcagggccagggtagacctggtcagcggatgcactttagcagatggaacttctagtttatctgaatatttatctttgacaaggtagggctgagcctacatttgcttttgatctatctagtataagaaatattcacagaaattgtatgtagataccctttgttttgaaaatgctgttcagaatcatagtgtaatctttgggacctatgccatgttcatttcactccttcccatattttttgtgtttcttttggtaaaactataatggttttcattttttacttaatatcacacagttaaactgtccatatttgagctttattttagcttatcagtgataaaaaacaggtagtaactgccattgtttgtttgttttcctaataaggcctgaaaacagccattccttgttaagaaagtgtacaatgtaacatatttgctagagttacatggattatatatttcttaaagggaaaaatttgagagtatcatggactaccaccagcattattattacagtagttactcagatttggttaaggaagcccaagcaatgtatagtgaaaggattattatctctctgctaagattcagatattgtttcagaaatctcagctccagtaattccacaacatctaaaaacaaatgtttgtgatcatgtgtaagcatgaaattgttccaagtaagtgaggatattttagttatgtgaaagacagtttcatggaaggtatttgttttataccagtggctgggatggtggaattggggttatttctacaattattcttagacgattactaaactgttaagaaatgccccatatcatttttgtatctaggaaagaaaaaaatcagtttcatactgttgtcatctgtcagaaatgctcattttattttgaattaaatgtggcttttgaagtacctagttaccttgaattcctggtgaccacatgtttttatctggaaaacctggagaaagttatctgtcccatctcccctgcttgtttttttttttttttttggttggagctgctgtttagatgatgcttttactatgcaggagagagtttttgttaaggatatatttgaagattggcttttccatattgtccttcattctttgaccatggcaaagtgtacagtagattttcatgatcattgcatatttcttgtcattgaaatgtatcttttatgtttttaaatgcattcattttacacttgtgagtttatcattgactttaagaggtagaaatgaaaaatgaaaattaaagctaaagcctttttatctattaatgcagatatattagaataagaatattttgggtttgtgtttattttttaatgaatttatgtttacttgatatggaaaattacgctttataggtggaaaagtagcaaataaagattaagtaaaagtaagtgaaaatgatggggaatatagtattggaattttatagctagttaaaacagtaagtatcatctaatttgggtgtttattttgcagatgagaaaacagacctagaaccgtggcatgttttgcctgaaacatacagtgagttagagacagggcctaagatagcttctagcatcagatcaatcccaagaatccatcagcaacctcagaccaacccaagaagataatttaaatctatactgcttattggtcaatatatttggttctagtattaataaagaaaaatgttattaaaatagcatacatagtagtaaaataaaatacaaaaagtgtgttgatttatagctgtttgagatgataaaagtgaagcaaagcctgttaaatcattggaagacttggaaaattattttaaataaacaattacatgt

SEQ ID NO: 15864 - DNA, 2359 bp, Homo sapiens
gatcacagcgctgccgggcaacagaagttaccaacagcagtaaactccagatggatctgttagaggttcatgtactgctaaggcgtggaggttgccgtactgcatttacaatttgcaacattgcactaattttattttccccagctgatataaaaaggaaagaaaaactatgatagacttcttggattaaaagcaatgcagtcaattattagatcttatttattttcatatgtttttcttttatttcttcattgtactctttttttttttgtaaagtatatgtaaaataaatgtgacatttttataatttatttattactaatcaaagagttttttatcttttaactgcattttgaagtctgccgtatttttacaagtgtgtttattaatttattttccaataggatttaaatagaaatgctattctcaagtcatctttcttgctgggttttaatgaggaaacaggaaagggtgaaggaaatccttgtctaaggactgcactatagttgagtttgatttttattgcacacttcttcccccacctttcactgatttttgtatttataaatgaatttgcggtaaggtgagctgcacggaaggaataagaagacaaatggcgcccactagtggggaatccgcactcacaaaagcacaggatgctggaaaacagcctgctcagaatttgttagcaataattaaatatagcaatcagcaaagtattcgacttggctggacggttttcgttaatatgaattatttatttgaaatgttttaaagaaacataagcctttttagtgatgcagatttgtctgtttgtttttcaagtcatatcagatcgttggcaactcgtatcccaagatgaaaaataagacttggtgtgaccagccaggctttcctgccatatgttggtacaatatacaagtgacaatattggtgtagatttgtacttagcaaatacaaacacatccaaatgaaaaattttgtagataccatatcccctgaaatagcatttatcttactgggttgactggaaaggaatggaaaatatagtaacacatgaaaaaatgctactccaatctgaatgattacttcaaacactggcaccttgggtctcacccaccataggaaacaagacaacattcaatttgatagaaatcttgccacaaaacttcaaatgctacaaaatatacacacacactcacacacacaggcatactcacacacagacacacacacacacacacacacagactcatccacacttcaaattgagcccacaatcttgaatttctgaacggatcagagtttcatagtttctatagtaaaggcaatgtctatttcagggattgtaaagtagttaagcattgtttcaaaagtttttttatatttattttttttaaggaaaaggtatagacaaccagctaaactgcctttttggtgtgcacacacatttcatgtgcagacgtgcctctgtgtaaatgtacacatgaacttcatgtgggcttaattttctgtgctataaacaaaagtgtttattttttattaacctcatggatatttagatggaaagtgatggcattcacaggcttgatgtattccactgttattactgttacctgcacaaatgaaaaacaatactcaacagtaattccactcccatgaaactttggtcattgttatgcattaagtggggcttatctttggtttggagttcatttgaactcttgaaccttagtttagtgaagatgaactgtctgttcttaggtagaaacggtgtttatttaaaaatcagttttaaaaaatgagctaccatatgtgctgtctattataaatgggacaccaaacaaaattttctattacagttgtgtacttgcaaacattttgctatacagtacttcatagatgcatacaaatgagctcacttattacaaagacaaacgtttaatttgctaaatattttaacaagtttgttatatattttatttaatttaaaagaaatctcttaccaacctacatatttattactataatttgctatgacttcaggttaatttatttgtgtttgcatagtttgagcaggatgttttgtgaagtatgtttgtatttatttgcctactttgtacttgatgtgttttgtaatgtgcactgaatttgttttcttttcaactatgttaatgatcaatactgtaaattgggtcttttgtaaacaaaaaggcaatgatgtatgcattttttttaatttgaggtagtttgtttgtatactgtttctccaaacacttaatatttcttacatcaaagcaacaaaattgtgttcagtgctgtacatttggtgtatggtaggaaataaaaattgataacg

SEQ ID NO: 15865 - DNA, 463 bp, Homo sapiens
acatttcctaagaatgtacatctaatttgaagaaaaagtgcctcaaatcatgcaaaatgtaaaaaaagatgaaatttatatttttatggatattaagatgagtaaaataagagacttcccagaaataactggttagctgtttcctgtcatagaatggagtctttcttgctttatctttttgtgtatacagtaatttataattttgtaaaacagagtttgaatcgcatattgaaaattagatattaaaaattgtgtgattgtattttatttttactagatatattattttctttatatggttaacattctaattaaacatttaattgtgtaaattatatctgtgagtgccagtgagaaataatgatttttttgtatatgactgttagtatatatttgtcaaatcatcgtgtaccaagttaaattttataattcttatttaatatttaaatacatttatttagaa

SEQ ID NO: 15866 - DNA, 1324 bp, Homo sapiens
cttatggacaaaattaatacattctatgacatttttttctgatttgtcctgcagtgctcattcatcactccaaaaacagcaggccatctttttatgcaaaagtcagcgtgacaatatacttcactggtgtacatcgtttactttttaactggcttcattttaggaataataaattcatcagaatccttggctgaattaaaatggtttttgttttttggtttttttttttacccagacaactctagaaatgcggaccaaactacttcattttctcaaagggcataccttgtgcattgtggcttatgatgagccatattaattgcctgttaaatatacactagcttgaacttagatgttaaatgttattattaccagcatttgtccttttgtgaaatcagtatcagaatacttgcactctttaacacattctttataaaatgtataaattattcagaactatttaaaataaagaggagtgttattgcatgctgataatcattttgagtttgcctcagtagatactaaagcaaattgtttcagtttttttaaatgccctttgatgtttcaaaaaaaaaaaggaactgtaatttgattgactgattttaagatcagccataagtaatcagcaatcttcaaaagcactttcagtggattggtcatctgggttctaaagggaagagtctgtgctactaaccatttcaaatgcagactcaaaccttcccaacatctttatgactctagaataatcatattgatgaaatcgtaattcatggttgagtttcagaacaaaagatattcattgcacattaaccatttagaggtcatttaaataacaaaatattgtattgtaaaagaactgtacaattttaaaacaataaagatttgaacctgtaaatgtgtgtgccttttaaagaaggatacatttttaatatatttgagtgattgctgggaagtgtgaaaatattgttatgtatcatatcaaagagaaacatgtttattacaaaaatgttctttaactatatactatgtaacagggtaaacagtgttatgtagaatagaattgtgtaaactagatctttagagaagttgccattgagcaaagttatttaaatgagttagttgagttggatgagaattgtttgaggtttgttgctagagaacaataataaaataattctttttcagaaaatatttaatttcttcataaaaataagttaaatatttttttaaatatgtatatctaatagtacaaaatggaataaacatcatagtgtatagaaaactgaatttgacaagttaatgaataaatgaacaaatgatttca

SEQ ID NO: 15867 - DNA, 3581 bp, Homo sapiens
ctagtcgtggagatgtcttcgtacagttcttcgggaagagaggagttcaatgatctaggtttaactcagatcactactgcagtctgacatgaaaagatagaatttaaaataaacttttagagatctcatggtctgaagtcatcagatgcagaccacgttcgtgatcagtggaaacatcaaggacaaaaggtccacgcaacacatgcacctcttctctagggcacagaagcgaggcagagcctcagttcctctgatgaacaagggaacaggtcttttccttctggtttgctaggtaaggttcagcacccatctgctgtggccttcctatgaaacgtagtttcaaaagctcggtttaagaaaaaaggaaaagaaaaaacattgctttcagagctcaatgggcatccaatccagatgtttcacaatgacagcaacaacctccaacggaatgggaactatttccagggttcatgcccagctcactgtatgctgtgtggacatgcatttcatgtggctgtgtggtaagaattacagcttacatatggcttggacccacatctgaggaatctgatgttcacttataccagaacattatcttgctatttatgaaattatttaaacgttcaaaagattgtttttaacatggtttaatttcccaaaaactacagttttttttcttagcatgctattcaggtaaacagtcttataataaagcatgtcccattgtcaagaaacataaagtggtgtgaataccactgaaaatatatatatagtatcttctgtaaataatagtacctgtgtgaataaggaataggcttgcctcccagccaggcaatttcctgagggcacactaatgatatcccctgagttgctaagttgatgctgagacattttgctgggaattagtcatggcatgatctctttcagactccctgaataccatttagtcccgtaacagtgctcacaactcatgtgctaatgaatcacaaaggctttaactagctcccaggttgtagccttcgcaggatctagtttatttgccacatctctttatgaacatatagcgattcgcagatctctctattcacggagaggaaggtgttttgcttctgtagatctcaaggtactattttgtggctctcagcaggaagtagaattgttcctaaatgtgtgctgaatgaggacatgatgtccctcctggtgccaggacacatcctgcatggcattctgtgaagggcatacctgctgaggataatgccaggagcagcacatttagggtaattttgctaaaacttccagatgacatataaattccctctttttccccctgaaacttaccatttcagaggtaatggctttttctgtaatttgcctgagaagaaaaaagggataatttagaaataacactccaagcctatatattactagggctgcatcctctggaatttaatagaaaaattgaatatatagccctatgtaactacagacatcattacaactgttaagttctgttcaccatgcaagttctcggtggtgtatgtactctcaccttttggaaacaaaaccttgcattgaaggttttacacatggcttcagaatgttactctgaccatgtttgcctctactccagattatcatggcacctaacacagatgacatatggcagaatggaagtgatttctcctaatgaaaatgaagtgctcttttgagtatttcttgttttattgagattcctatctgcccttgtatttttataactgaatgtaaataggaattgcttaaatactggtttacactaatcccatagttaaaaatcttggctatggtacaggaaggatatctatatagaggatagttccagaaacaagccctggtgaaataggaaatataaaaacttctttatggaacaggaaaacccaagagactttctcgtcagattcctttccagtgcaaagtataacagagataggattatgagatgaaatcacagtagtgtgtttcctttaattttttctgtcttctttttttttttttttttttttgagacggagtctcgctctgttgcccaggctggagtgcggtagcacagtcttggctcactgcaacctccacctcctgggttcaagcgattctcctgcctctgcctcctaagtagctgggattacaggcgtgcaccgccaagcccggctaatttttgtatttttagtagagacggggtttcaccatgttatgcaggctggtctcaaactcctgacctcagaatattcacctgcctcggcctcccaaagtgctgggattacagatgtgaatggccacgcctggcctgtttcctttaagttagcacttcacgtgctcttacagcgttaattgccattattggtttgcctgattttcctgcatctcctcatatgtaagtctgcagcccaaggagagaatagtagctgtatgtgcccacaaggggtgtccaagcttcttgattcttgttaatatcgactccccaacattgaaaaaggagtgaagaagggaatatcattttagggtactgctttaaaggaatgataaagtaaacaacgtagcagggaaaataccacttgcacaaatgtatttctttgtcaaagtgtgtacacgctttctgtttgtcctgatgtcctgctgtgaagcagggaccacattgccatttattcattgttccaggcaatgcatttgtccaaacccctctggctctctgatatctctcatttcttgatgttcctattctctgacctcaacaaggaggacactgtctgttgtgtctctttgagactagaactccatgtgtttaaccttcagatccattctctacatgaaccctattctttccaccctggtaagaaggtctggaagacaggtcctaacgaggggtcagagaaggcacagagaaatgaaccagccatgcaggggcagcactgaggaggaaaccccccactctaactgggaggagagtggaaacactcttagtatctcagagtagttaccaatctaagagcatccttcgagtttaagtcaaaactctaggcttaataccaaaaataatacatcatttggaaaaatagcttggagaaaaaaaatcaataaagagtcacataaaatcttaagaaaatggttctattctgtgatatattactaagaaatacagttcttaaacgtgtataactattgtcagacaatttataggtgtttcatctagtcctgggatgaaatacgatgactcatgcaaattcagggagcacactggctgactttaaattggaacattgtaaagtgaaagctgtgaaaggttgtgtgtcctatcaatgagatttattttctaaccaagagctgttcggatgattcagtataaatacgaaaatcacatccaaaaacggtataacccagcttccttaaggcaattttcttctctgaaacaagaatatactcatatgttctttactataatgtatatgatttttatcttgtactttaaaagatgataattatgcattgtatatacgattgtgtgccttgcaataaaatcaaaactgtacctgctgaaaatcacaacagtc

SEQ ID NO: 15868 - DNA, 408 bp, Homo sapiens
gcctgcctctggccttcccctccgcctcaatgcagaaccagtagtgggagcactgtgtttagagttaagagtgaacactgtttgattttacttggaatttcctctgttatatagcttttcccaatgctaatttccaaacaacaacaacaaaataacatgtttgcctgttaagttgtataaaagtaggtgattctgtatttaaagaaaatattactgttacatatactgcttgcaatttctgtatttattgttctctggaaataaatatagttattaaaggattctcactccaaacatggcctctctctttacttggactttgaacaaaagtcaactgttgtctcttttcaaaccaaattgggagaattgttgcaaagtagtgaatggcaaataaatgttttaaaatct

SEQ ID NO: 15869 - DNA, 1547 bp, Homo sapiens
gttggaagaattggcaaaatatctggaccattaagaaaacggattttgtaactagctttaaactaggccaagcaactagttttcctgcaaatcaaatttttaaagcaacttgggttagactttgtttttgacctaacatcccttccttaaatgccttctgtagtttcagatcagtagggagaccatataataattttatggtacctgtttcaaaacatattttttctgtttttataagtaagttgatattaattaaactcttggcaatatttcttctttcttaaaggaaaatataccttaactttttttcttttacactgtgaaacatacacagtagaaattctgttactctctgttattaatacataaatgaaaatacatttttttccatattggcatgtagctacaaatattaaaggaggagaaaaggtaatataattttaggtttaccaaatatggtgtgtattcaaataatacttgaccagcttatctaaaatgtacataattttgaggtagcttatgaatttgattttaattattatgttcacaagcttggaatattagatattattttgcatctgtaactaaccgtgatcatcatttcttgtaatttcttgtacatgtatattacttgttcttaatagatttttggaaacaagactttattgagatcagtttggttttcctgttaatttacctgtttgactttataatgtgttttagttttgcagaagaacactgttgtagtttagaaggcttttcataaatcccctcataggcaaagatgaaaacttcccactatttttttcccctcttaggaagacatactggaaagaaaatgtttagcatcttagtgtagtatagctattgtaaacagttcatgactagattttgattcggaaatctatactgaccaaggattaatcttaaggattgtataattcattaaagctgtggtctttccatgtggagactgatagaaaataattttgtcccaagtcttatttgctgactttttctgtcatgagtgagattgttgaacaaactgaatatatgggctatagcaagtagctttacagtacagatcttacaattaagttttgcttttgttaaagtgtgtaccattttttctgtttggagtaagacaaaaattgttttgacataggttccctagggtacacttgctctagcatactttaaaggccactgttgcaaagtctacattttatgctgaatctgcattctgtcaggcacccgtagaaagacctcagtacatgctttgcactctcctttgctccctttttccaatttcttattgcatatcattttgttgtaatacagaaagcagcatttttaaatgtccgtgttaagaattggcccactggtaccaactcacctctattttgtcagttcatagttgaagattttgttttatttcaaaaacaaagtacatttttgaaataatgtttcagaataaaataatctcacttttaagtgatccattttaaaatttgtaattcaataaagttttttttgttgttaaacat

SEQ ID NO: 15870 - DNA, 1686 bp, Homo sapiens
cgtcactaagaggccttgtgtagaagtacaccagcatcattgtagtagagtgtaaaccttttcccatgcccagtcttcaaatttctaatgttttgcagtgttaaaatgttttgcaaatacatgccaataacacagatcaaataatatctcctcatgagaaatttatgatcttttaagtttctatacatgtattcttataagacgacccaggatctactatattagaatagatgaagcaggtagcttcttttttctcaaatgtaattcagcaaaataatacagtactgccaccagattttttattacatcatttgaaaattagcagtatgcttaatgaaaatttgttcaggtataaatgagcagttaagatataaacaatttatgcatgctgtgacttagtctatggatttattccaaaattgcttagtcaccatgcagtgtctgtatttttatatatgtgttcatatatacataatgattataatacataataagaatgaggtggtattacattattcctaataatagggataatgctgtttattgtcaagaaaaagtaaaatcgttctcttcaattaatggcccttttattttgggaccaggcttttattttccctgatattatttctatttaatactcttttctctcaagaaaaaaaaaaaagtttgttttttctttattgtccttcatagcaggccaagtattgcctctctgcaatagacagctactgtcaatacatgctgtaatttgacattctgggtcacagatataaggtatttaaaatctatttatgctttatagagaaaccagacattaaaacttcatgcactacttatttcgaattactgtaccttatccaaatttacacctagctattaggatcttcaacccaggtaacaggaataattctgtggtttcatttttctgtaaacaactgaaagaataattagatcatattctagtatgttctgaaatatctttaagactgatcttaaaaactaacttctaagatgatttcatcttctcatagtatagagtttactttgtacacgtttgaaaccaactactgtagaagatgaggaatctattgtaattttttgctttattttcatctgccagtggacttatttgaaattttcactttagtcaaattattttttgtattagtttttgatgcagacataaaaatagcaatcattttaaattgtcaaaatttccagattactggtaaaaattatttgaaaacaaacttatgggtaataaaggctagtcagaaccctataccataaagtgtagttaccatacagattaatatgtagcaaaaatgtatgcttgatatttctcaactgtgttaatttttctgctgtattccagctgaccaaaacaatattaagaatgcatctttataaatgggtgctaattgataatggaaataatttagtaatggactatacaggatgttaataatgaagccatatgtttatgtctggatttaaaaattttaaacaatcatttactatgtcatttttctttaccttgaagaacataaactgttatttcacttctacaaatcagcaagatattatttatggcaagaaatattccattgaaatattgtgctgtaacatgggaaagtgtaaatgtttttcatggtttctatcaatgtgaaataaaatttaattctg

SEQ ID NO: 15871 - DNA, 36 bp, Homo sapiens
gtcaactattttaataaattgatgaccagttgttaa

SEQ ID NO: 15872 - DNA, 1371 bp, Homo sapiens
taacaaagggtcaactagaagatgatttagtacatttatattaaatgtttgtatctaaggtactgtcttctgaattttgtaggtcctataattagtattttttaaaaaaatcatgttaataagcatctttcacagaattcgtttctttaaaatagtcaattttgtttttgcaattgtgtcaaatactaacaaattacacacctagtaattcagaaaaagatgtcttatttgtaaattcctaacaatttatgctaaacatatagattcttaagtttattaataacagcagtttaggttaaacaaacattcctggataatgcgttaaatttctgtatctgtcgccctgagctgattttgaaagatggtataagctaggggttagtatagttgtttaagttagaaaaaacatgctgttgtctgcccctcattcccttcatgaccttgggcaagtcacgtaatgtttttgtgcctcaacaattcactttttaaaaacatgatcgtatgatgaatgatattattttgttatttatatttactgtgattgataactgttgaaccaaaataataaaataattaatttaaacaatgtcaaaatcctttagcagttatgtatatattttctccattgtgtgtttaaattatgtcatgtccagttgccaagcacaatgaaaaagatgtattattttttaaattgaataaaaaattaggaaaaataaaatttctaattattatttttagtatgatatttttaacaagagtctataggcaaacaatatagggtgtgctgtgcattgtcagccctatactgtggtcttaataatgccagcttaaaaatcactgttgtgctctgcatttcgtgtgttagaagctgattctaggctgaggaaagcaagagttctctacttttgctcaatattgaggcttacccagtttgactctacagccagtgaagtggtttattgcttcaataaaaatatacttgaatgatgaatttatttatgttttgttttgtttttatttagagatggggttttgccatgttggccaggctggtcttgaactcctgacctcaggtgatccacctgcctcagcctcccaacttgctgggattacaggtgtgagccaccatgcccagcctgaatgatgaatttatgtgaacacaaagccctctgaaaaattaatgattttcaatttgttgtcttcttgaaaactgaatttaagtattatttaaacagaaaagtgtcagaaatcaaatgcagtatctccctctcccttttttaaatgttgaattagtagggtttttgtatagctttttgtattgtgtgtatttatgatatgtgaaatgtacataaaattaaacaatgtgaaaat

SEQ ID NO: 15873 - DNA, 5319 bp, Homo sapiens
gattctgggacatggattcattacagaaatgtatgtgtagctgtgccctagatgaccatttttattttagtgcctactttaaaacagtataaaaatttctgcttttgtataatacaaattttcattaagccagtataaaatagaaactagcttttaaactgagctttggaaccatttgtgttcagttaagtttacctgggtattttgtcctgattcactgccaattgtcacattttaagacttttttttttccatataggaaagccattattagtagtaaacttttacaaatcccattttcaaattacttttagatcttaaaattttcatttttgtctaataacagtggctctaccttttgacatctggctcattaaaaaatttagcaatagaatgtaaattgtataaaaagtttgtgaataactcaagggtttaaattttcttactagcttctaaatggattaataatcaagtgcttcaaatgaattaagagtccagtttcggaagataataaatgtttgttagatacaccataatttcagatcagtatattctgaagactccctgttgtctggctaaaatatttgccatctttattatgagcctttaaggaaaacaaaccctaaacacaaagcatcagtatttatagcaaaaagagactctgttaggtgacatggcatttcgtgtcacttaatagttggccctaaattagtacacaggatattttgtcgtgtttcatccttcttaacatgctatcttttcatttaataatagtaatagtgtatggcattggggtcttcagagtcgatatataggtagatctctttagtcttttccacctttcacatccaaggggtgggtcaagtgcagccagcaatttattttcattgttggcccacggttagtccataatctagagccattgtggaactgcagccatgaggtgtgtttatcccacagtggattgactcagcctctgtgggtgacagacttctaagcaggaagatagacgtgaagcacatggttacatttgggaacttgtgtagggatcatggcccctgtagccagggttaaaaactggactttttagaagtaaagtaaaagcatatcgcttatatcatttcttgctgaatttgatatgtttttctttcccttaagaatcaaaagcagaaaacaaaaacaacagtcctactccgatgttatctttctgattcaatgtgaatccatctttccttgcaatattttggatggagaatttgaagttaaatgcattagaaaactacctgatgaactaccacaaagttttaagtgactagaaatatatacagtaaaatcccactttcatgcatctctgggaaatgataggagtattgcaaataagttgagtttgtagagggtaacaaagtaaagtaaaacaaacctatcttggttaacatgaaaataacaattgagaatatattatattcactgaataattataggcttttcctcacattagacaaccaacataatcttcttaaaggtctaattaatatatttttctaagggtcagttgggacattaacctaagaaacatatctattaagcacttgttaacaccttattttaggaccctttccgttggggatgggggcaagggtgggaggtttttagaagagtatatatctctttaaaaaaaaacagaaagaaaaatatttctgagcactcattagccctatatggaaacttctttcctttttgtagggccagttatcactgcagattgcaatgtttaccaagaatttctaaaaatgagtgcagattactgaatataatacattatttaaaatatttgggagtagtataatttgtggagaaatgtaaattgtaataatgtaaatgggggcttcaatatatatatataatacacacacacacacacatgcacacataccgcacttcatagaatcaaagttgctctctgaaggagctttggctcctgatattttatcatgctcctatatttttttaatccttggagcagtagtttttatacttatgtatttaaattttattatgaaaaattacatttattaaaaaagtgtgttccaaaggcattaaaattatatatgttaataaggaagtacatttttaaatttttcaaactgctcctagcttttgattaggagaatattttttctgaaagtaggcttttcgctctgcttcattactgcttcctttagtttctatgaaacagattgcttacctaaatctttagttgaatgattagtgttcaatattgctttaatcaccatataaaaggaaaaaaattggtgacagagcacaaatagaaaacctatttttaaatagaaatcacaaatagcaagtgtggaagcactactttattctgtttaaaatgtacttaagaagtcatcaaattagtgaactgagacattggccttagtaggctgtattcactgctaatttaaaaaagggagtaccaggatttattaagtaaagcattttggaaatggggaatagcgccatatatgtatgtatgtgtatgtgtgtgtgtgtgtgtgtatatatacacacacacacacatacttaaatcttgccctgcatgaaattcaaatacatggaggcacatcttcagggcaccagtgttaaaattttggagtcttaattttcatgtgtacacctctttgcctgttcccacccccagacttgaaataacacttcagagtaagagggaattcagctaatttgtttttaaaattgactgtagtggtcactaaaccctttttgagagaatttctattaaagatgaggcagactcgcttatttgaattgcacaatgttctaacaaggatgtaacacagaattggcttttttttccctagaaaaagattgtttgtttctatgtcaactagatatgattaaaaataagtattgccaatgctgttttcattctctagtggccagaatcattatccttgaaatttctggtagtgccttagcttggttaaaaaaaaaaaaaaaaaaaaaaaaaagggattaacattaaataaaagtagtttagaatttgggcctcagacaagatattgaacctcattcagtttcacttccacatgtatgtacaagttaggtcaccaaacacggaagtgtgagtgtggaaggatcttggcactgtaagcaatgctatccattgatgtatacaagtacctttatagttatcgatcactgttaaaactttcattttaaaatcctattaccaagttcagttttttaaaacttcaattgtcctggctgattatgcatcactctgtgtgcaacttttttatttcatttagtgtttctttcaagctgtgtatttttgcctatttgttgcttgtgctttatttttcttagtcatttgtggaatatagtgatatattgtgttaatttggacagtagcggtttttaaaaaccatatactgactgaaacatgagccagagccgattgctttattaagctaataatgaatgttaaagagtacatattttcaggatcgttcatctagtgagcaatacacatattataggccaatatttttttaaaaaatagagcttggtcaacctctatactacacatattacaagatatagcactttcaaaatgaatctaaacctttacagaaactttcttataggttatgccttttattttaagacttattataattcaagtgccattagatgatatatatgtaggcctttgatatataatgctttgtgtacaaaaatggtagatggtattttaaacaggtacatttttacagtgttttcttatcaatttgctatattgcacagaatcagtgtgtgtcttttcataaggttttacaatggtttatttttttacaaggtttacgtgtctcaaagcacactgtcttcccagtacgtaagttaaaaaataccagttcacccaagttgcttctagcctactgagatccatgtgacattggaggagatcttttaaatgtttagtattcgtcattagcaatggctggctgttagttctggtaaatgtgtgcctaagttgaatttgtcttgtttttctcacactgtgtcagcagccatgtctacaacacagataagtctgttgtgatcacatagatctacataagttgtgcagttttgtgctaaaaacccatagggagctcctttgggatcatagaaaagaagatcatgcaaccagcattggtgaaggcacactcagattgcacttagggcctttctatgatgttgtcaaccctctgaggatggaaggcagtgtcttttgatgttatctagcctagaaatgacacagaactattgctaatgtataaaacacttcattatataagcttcagtggtacagatgaaccagaatgaatgtttatcttctcagaaacactccttcaatattatattggatcatgctgctaatgtaacttgggctacaactcttcatggtgctacaaacttctctgtctcattcagtcgtatttttttatccatagaaaaaggactacattaggtgtaaaagtgtacaatatatttttatactgtgacttaatttgtcattaacaaacttttacaccaccacaatgtattcatgtgcacttgcaaaaggagatctcggacatgcaaatgttaccagaacaaacccagcttttgtccacaaggtgactgtaactcagaatggaaagtgggctttataatagggtgtggagtgaagaacatgctgtatgttactaacagccctttgaatttaacaaaaactgggaatccattaggaaacggattgcatcatacctgaacataagctggactgctgaaattgtatttttagctaatgaaaaagtgtttggactagtactctaaaaatgttctaatgataaagttttgagtcaaaatagaaaagaaaaaaatctgcattccaggccgaattttgtatatttttattgcatttaaaattgctattctgtaatattgggaaatcaagtggcttatcatgtatatcgtgtacttaaaatgtattcacaaactactgttgtatttgtataaaatatagacaaagatcatattttttgtgtgtgtataagctctgtaaaatagcaatcacattatgaagctgcagtgatactacattttaaacattcacatccaaagaagcagactatttattgtccatataccagatttaaaatattaatttgctgctaattaaataatagtactgcagcttcttgtggcctacagtgttatgtttgctgtaagaataagatatgtgaattccacaaaatatatgaataaaat

SEQ ID NO: 15874 - DNA, 1468 bp, Homo sapiens
agaccaactctatggctaaggtcatctgatacacagtgttacataatgcgtacttcaatgaagaaaagtatttttgtctgacagtggaatatatctggagaccacaagtaccactcctattctgttatctggactagaattttcaatcaatgtgtttgaaaataatgttgctatcacctatttggttgagttttggttttttctttttctttttttttccaaaaataaagacagcccatttttgtcatttccattaccacagatgtaagaaagtgataagccatggccatgagctgccctgagctttggtcgttggggaggtggctcaaatggagccagcggctgtggttgacctgccttggggagcagggctgaggggcgaagaggacatgtggatatccagccagaatgccctctctccagaggacacacagctctggatttctacccccttgctatcctctctggccattttgaacctgtaccacctaatgtagaaaaggcccgcctccagtgcccttctttccaaaacagctacacaaatgcttctgaatgccctggatacgcagaccgagtggcagtctggctaaaggcccatccagcactattgtgcccaagagccttaccgggcattccctgaagccccctcataggcagtgatcctagaccaaactcttaaatagaatcacttttgtttcctagaagagatcaaagagtggttgcttcttactttgaagatgaaattataccaagttaggttttttgctatctattgatccaaaaaatatattcgtgcaattaaagttaagtgttcaacttagtatttcaagttgggattcaggttgaggcattttcctgcagaatgggcaattttatgcatttatattcatcagtgctgccctcactttggatctattgtattcttacagtttaatcaactggcaaagtgctttcatgctttggagattaactataaaagcaagattaagaaaaatatgttaattaccatatccctggaactccttctcaggctggtgggggcagccttgcaagagaaacagcagcctttgtctcttccctcttgtggggagcaaggaggggatgagcggtaccttgggagacccggtaaaagtctaaagaattgagaatttgactatcttgggggtaaaatgctgtcataggggcagcagtctcagggggtgtaaactctggaatccactatggtttaccttgagtggcctgcacgaacatgacagccctgatctgtatttcctttccattcagaaaaccttaaaaaaaaaaaacttgttttatgataatattataacaatcataactaacatttactgtgcccggcagcaaattaagtatttgacaaacattatttcattaaacgagactgtcaatcattactcaaagaatgatgaaggtatttggtgtatgccaaagaataaaggcgttttatttc

SEQ ID NO: 15875 - DNA, 314 bp, Homo sapiens
tatcttttcccactagtggccccaggccccagcaagcctccctccatcctccagtgggaaactgttgatggtgttttattgtcatgtgttgcttgccttgtatagttgacttcattgtctggataactatacaacctgaaaactgtcatttcaggttctgtgctctttttggagtctttaagctcagtattagtctattgcagctatctcgttttcatgctaaaatagtttttgttatcttgtctcttatttttgacaaacatcaataaatgcttacttgtatatagagataataaacctattaccccaagtgc

SEQ ID NO: 15876 - DNA, 1084 bp, Homo sapiens
gcataactgattacagggtacagttcttcacagctgaaatggttagcctgagatgctggaagcttcaaaggattggtggagactatgcatggttaaggccatcccgaactttttaaagtatttatgaagcatcagagacttattttccctgtaatagaatgcaaaatcagggaaaatgggttgctttgtgtctcaagtattgtctttatttttgagactattttcatacagttgtcatacacaaggcgcatatatatatttgtgaattaaaatctgtagctgagtctacattgttatgagtcaccattttcacacaacatcatgaatcttcactgttagtactttcatatagaattcggttgaaggaaagattgatttttgtgtagatgtttaatataactttacaactatatctcattgaaaataaagtcattggggatttttacctctaatttggatggaaagcacaagaagccacacattcattaatatgcaacaaatgttgtatttatgttactgaatatttctatggattaaaatagaaaaagtttaattgattttttcttttaaattttaataacaggttcaccagctggtagaaaatagagacacatgatgatttgcattgtaataatttctgtgtgtatgtgtgtgtgttgttttgtttttataaagaaaagtgtgtttgtacccatgagttcagcatttctgccatcttgctattttcattttccctgtggaagatgcatggttgcatccttttccttctgaccaacacttagtctttaactttgtaaggttcggtttaaggtttcagggttagcactatagttttggttcattttctcattaacgataaaatatgctgtaaggcactataagaatataaatgattctattacaattgaaagttacttgacattacatgaattgaactgcctttcattatcttcagacactttgttttagtatttttttttaatttgctaggtttgtatatagaagatcctttcattatcaagaatgagtatggttgcttttgccatggttgcttttactattaataaatgtatctagcctaccc

SEQ ID NO: 15877 - DNA, 1296 bp, Homo sapiens
atacatggctggaataagaggacactagatgatattacaggactgcagaacaccctcaccacacagtccctttggacaaatgcatttagtggtggtagaaatgattcaccaggtccaatgttgttcaccagtgcttgcttgtgaatcttaacattttggtgacagtttccagatgctatcacagactctgctagtgaaaagaactagtttctaggagcacaataatttgttttcatttgtataagtccatgaatgttcatatagccagggattgaagtttattattttcaaaggaaaacacctttattttattttttttcaaaatgaagatacacattacagccaggtgtggtagcaggcacctgtagtcttagctactcgagaggccaaagaaggaggatggcttgagcccaggagttcaagaccagcctggacagcttagtgagatcccgtctccgaagaaaagatatgtattctaattggcagattgttttttcctaaggaaactgctttatttttataaaactgcctgacaattatgaaaaaatgttcaaattcacgttctagtgaaactgcattatttgttgactagatggtggggttcttcgggtgtgatcatatatcataaaggatatttcaaatgattatgattagttatgtcttttaataaaaaggaaatatttttcaacttcttctatatccaaaattcagggctttaaacatgattatcttgatttcccaaaaacactaaaggtggttttattttcccttcatgttttaacttattgttgctgaaaactctatgtccggctttaactatcttctctatatttttatttcattcacattaatgagaagagttttctcagagattaaaaaaggtagtttttctgtcattgttaaatacacattatcactgaaaaaatgtagcttttatgtgatatgttttaaagttaaaactggatggaaatagccatttggaagctttggttatgaaacatgtggagtgtattaagtgcagcttgacattatgttttatttaaatgctttttatcgctaaatgacttgcagatgaaaaaaactaaggtgactcgagtgtttaaatgctgtgtacaacaatgctttgataaaatattttaagtatgagttatcagctctatgtcaattgatatttctgtgtagtatttatatttaaattatatttacctttttgcttattttacaaatattaagaaaatattctaacatttgataattttgaaatgattcatctttcagaaataaaagtatgaatct

SEQ ID NO: 15878 - DNA, 599 bp, Homo sapiens
gtgccttttcctctcctgaatattaaattgaactctatttaatgcatttttaaaccaaacttttaaacggactggtgaatgtgcaatgttagtaattagaagttttaccacatggaaaatttgtggttttaaactttctaaatcatggtgacttcattgaaagccattagttgctattctcttagggcagataaaatgcggctgtgttaggaaaaacatgttacactgtaaggcagatgatcgtccccgtatgatgattgtcagaagacaggactaagtagcagagaatagctaagagataaattgggctggggaaacttgtcagaaagcactgaacaattaagaaattttccaagaaaatgtgcagtattctctgctacttctgaatctgttttgtcttcctaatctatcacaattgccacccatcgggttttgggtgtgtgttttcatagcgtggttactttctataatgctgtacccagattctaagaacctggagaaggattagcagttcttagtaagtttactgtgtataggaacggtttgtatttcattacagctattcatcttttctacattaaaaatatttttctctaaag

SEQ ID NO: 15879 - DNA, 2329 bp, Homo sapiens
gaatctgaacacctcttctttccactgaggaattcagggaagtgttttcaccatggattgctttgtacagtcaaggcagttctccattttattagaaaatacaagttgctaagcacttaggaccatttgagcttgtgggtcacccactctggaagaaatagtcatgcttctttattatttttttaatcctttatggacattgtttttcttcttccctgaaggaaatttggaccattcagattttatgttggttttttgctgtgaagtgctgcgctctagtaactgccttagcaactgtagatgtctcggataaaagtcctggattttccattggttttcataatgggtgtttatatgaaactactaaagactttttaaatggcttgatgtagcagtcatagcaagtttgtaaatagcatctatgttacactctcctagagtataaaatgtgaatgtttttgtagctaaattgtaattgaaactggctcattccagtttattgatttcacaataggggttaaattggcaaacattcatatttttacttcatttttaaaacaactgactgatagttctatattttcaaaatatttgaaaataaaaagtattcccaagtgattttaatttaaaaacaaattggctttgtctcattgatcagacaaaaagaaactagtattaagggaagcgcaaacacatttattttgtactgcagaaaaattgcttttttgtatcactttttgtgtaatggttagtaaatgtcatttaagtccttttatgtataaaactgccaaatgcttacctggtattttattagatgcagaaacagattggaaacagctaaattacaacttttacatatggctctgtcttattgtttcttcatactgtgtctgtatttaatctttttttatggaacctgttgcgcctatttatgaaataataaatataggtgtttgtaagtaaatttgttagtatttgaaagaggtttctttgatgttttaacttttgctggcaaaaaaaaattcacgcttggtgtgaatactttattatttagtttttacagtaacatgaataaagccaaacctgcttttcatttagcagcaaattaaagtaaccagtccttatttctgcatttctttggttgatgcaaacaaaaaactattatatttaagaactttatttcttcatacgacataacagaattgccctccaagtcacacaagctccaagactaaacaaacagacaggtcctctgtcttaaaaaggttacttcttggttctcagctggttctagtcaattctgaaccaccaccccccgccccccgcaaaaaagtaaaagtcaaaccaaacttcctcaagctgcatgcttttcacaaaatccagaaagcatttaagaattgaactaggggctggaagaagtgaaagggaagcatctaaaaatgaaaggtgagtaaccagatagcaaaagaaaagggaaagccatccaaatttgaaagctgttgatagaaattgagattcttgctgtcttttgtgcctctacaagctactactcattccagaattcctgggtcttccaagaggattcttaaggtaccagagatttgctagggaaccaaaagtgcttgagaatctgcctgagggcttgcatagctttcacattaaaaaaagaaaaagctagcagatttactcctttttaggggatcatatcaagaaagttagtctggttggaaaccaagagaatggctgatgtctctttcttggaatatgtgaaataaatttagcagtttaactaaatacaaatatatgcattgtgtaatccactcagaattaaacagacaaaaggtatgcttgctttggaatgattttaggcattgtacaaccttgaatcacttgagcatgtaataactaataaataatgcagatccatgtgattattaaaatgactgtagctgagagctctaattttcctgtcttgaaactgtataagaactcatgtgattaagttcacagtttattgtttgtctgtttagtattttagaaatataccagcactactaattaactaatgtcttttatttattatattatgataaagtaaaaatttcacttgcattaagtctaaactgagaaggtaattactgggaggagaatgagcagctttgactttgacaggcggtttgtgcaggaaagcacagtgccgtgttgtttacagcttttctagagcagctgtgcgaccagggtagagagtgttgaaattcaataccaaatacagtaaaaacaaatgtaaataaaagaaaacacatcatcaataaaactgttattatgcgtg

SEQ ID NO: 15880 - DNA, 1122 bp, Homo sapiens
gaggaagacaatggtcctataatgcccttggataagaaaaggaaacttttgagctgcaccttcagtttatcctcaaagcctgcgttgtttgtcttcatctaatccagctttgatggacatctgtgatggttgcctgtacacttgctgaaatgaaatattagaaatggctgtatattccaaagaaaccctatattatatatccacattactgctgctaggattcatagttgcacatactgtttattgcttatgtgtagaaggaatgaaactagtttccagagttgttattaatatgaatatatatcatgtgttaatattgagaaaggaaaaatacattcccggtgttagtagttcttcatttcctgtctccaacagaaaattcactcattttagaactagtgtaattcttgataataaaataagagttttgattaagaacagcatagagcttcaaaatgcaaagtgaatgattagtaaaattatgtctcattttattttttcagcacccataccacaattaatattaggctggattgccatgggaaacattttttggcattaatgcagcaacataatactcactttaggtattactacatagttgaaggatttaactgaatgtatggatcaaatttatttatttgacatattcgaagctgtggtttaataggaatttgagaaaggtgtaagaaataggataaaaagaaggtcagcaccatgtaccaggaatagctttactttccatacatagaaatataaatttagtggtatcctatattactttagtgtcgtacgctttgtaagacttaaatattttattctattgattccactactttggtatgttaagacatttctttaaagatgaccaacaatatccttattttaggtgccactagcagatgtaagcgtatacttagttgccgttagatgtgacagaatgagataatttatgtaaagcagtagagtacctggcacaaagcaaacaataaatattattgttattgttgttataattgtaaaatgaatgacttcaaaaacatagtcccagtttggagggattttgtgatgcagaatatctaagtcatagaaatagaagacaggtggaataagtatatgttc

SEQ ID NO: 15881 - DNA, 96 bp, Homo sapiens
catgaattcatgcaagcttgggaaactctggagagaggctgcctttctggttccatctccttgggtgtgaggatagaatttcgaacaccaagagtc

SEQ ID NO: 15882 - DNA, 1737 bp, Homo sapiens
agcttcaaaaagactgcccctaccaccacaggaggaccagcctaaccatacgctccaaaagatggctgtgatagatcttgtgaagcaattactgagcagatcaagatctttgggaaggaacactaaagatgttttgaatgaattatagtccactggcattttagtgtatttttttttctttttagaaacacacatttctaaaaatgtcatgttacattcctgcatgtcccttttgatagcattagtggatccattggatttcttttttctttttgtgagacagcttttagtcttacctgaatttatgtgtgtttttccgacagtggttaataattatattggtgatgtagcagcaattgtgttggcagggttttcatatattattagtaattaacactaactgttggactgacttgtgtacactgtgttaaacatgatttaaaagctattaagagtactttgtgttagcactcttaaaaacgctaacagagatcatcattagctgtgaagatttgagttgtatatacctgcactgatattcttatcaaaaatttctacattagctttaagtgttcagattaacacttttgaaatttttgtagcttttagctgattaattagaaaaatttaatatttcagtgaaagttttaaattatcatttatttatttttttaaatgagaggggaaagctgaaattccttgttaagacacaaggaaaaagaatggccctactattatcatgcaaaaatgctttgttggcacctcagattaatcatataatagctatagtctcttcagcatttgtttaaattttagaaaacctgtataaattactggtgcataacttaaagattattctgcctttggctaattgagtaattcccctccagcactagagaccgctcagtgctcttactagatgaactcagtaacgccttgagctgggttgattgaggatgtgtgaaaagctcacagagcccgatgcctgctgctatttcacggcaatgagcctttttctttctacactgaagattttcttcttatttaatgtggtttattttgggctcagaaataattgctctgttgaaaataatcctttgtcagaaaagaaggtagctaccacatcattttgaaaggaccatgagcaactataagcaaagccataagaagtggtttgatcgatatattaggggtagctcttgattttgttaacattaagataaggtgactttttccccctgcttttaggattaaaatcaaagatacttctatatttttatcactatagatcatagttattatacaatgtagtgagtcctgcatgggtactcgatgtgtaatgaaacctgaaataataagataataagaaaagcaataattttctaaagctgtgctgtcggtgatacagagatgatactcaaattataataaaactcttcattttgtgaattatagaagctactttttataaagccatatttttttagggaaactaaggagtgacatagaactgatgaatgagtaaaagtaagttttgctggatttttgtagaactctggacgttgaggattcattatgctgtggttaactttaaatatttttgaattccaaatatctgaattaatgagccttgtctttacaaatatgtgccattgtgcaacatcggtggattttctaaaaataatgtaaatgtcttctattaaatgttgagtgcaataaaatacagaagaattctct

SEQ ID NO: 15883 - DNA, 526 bp, Homo sapiens
agctctggcatcatcatcccagaacatggtcatgttccagattgcagtttgttacaaaaaagcatggaaaatgtaatattgctctgattggtgagggtgtgtaaattagccattgaatgtatcattggtgcttagcaagtaaattacctgaaatttaaatataccgtctcatacttctaaatgtaaaaacattttaaaaatgtcatagaatatgatgtaataacttctatttattgatcatgtattcagataaatgtatatgtatcatgaatttttatggattaatatattgaatactttcattgacgttaaataagaatattaagattttaaatgttatttctgtgcataatgccttgtaactttttcaagtatgctaaatactcagggagatggatttgctcgttgttttcttccctccttccccttcctgcttccctgtttttctctttcgtggacacctccccaggctcatgtgccaccaccttccctcctctccagccctcccagccctcccgcagccttt

SEQ ID NO: 15884 - DNA, 248 bp, Homo sapiens
aagtcttcaatttgttaacagagcaaatttgaataattccatgattaaactgttagaataacttgctactcatggcaagattaggaagtcacagattcttttctataatgtgcctggctctgattcttcattctgtatgtgactatttatataacattagataattaaatagtgagacataaatagagtgtttttcatggaaaagccttcttatatctgaagattgaaaaaaataaatttactgaaat

SEQ ID NO: 15885 - DNA, 380 bp, Homo sapiens
gaagttatgtcatgtgaatggcttcctaactaaaaatacatgagtgatatccaacctggttaaatgaatgaaagaaaaggagcaaatcttttaaactaatgcttgcctgaactttaaaaatgtagaaatcttctgacatgagcaacacaggtgtttggaaagattttttactttttaaatgcttttttctctacttttgaagtaattaaatgtcagtacattttaagagcataaaaatcggcgattttgtacttgaagagaacatgaaagttattgctaaagtagctgctcatgtgcatctttgtatgtttctagaaagttatattttaaacaagttctctgattaaattggtttagaaaaaaatttagaaatattccgc

SEQ ID NO: 15886 - DNA, 507 bp, Homo sapiens
agaagctaaaaggaaagaaaataaatctatcaaaattaccctaaacatcctaagctcatctatttctttttaatttctgcaaatgtaattgatttatttgtttaaaaagcgctaatttctatttgatctgatatcagtccagtttgtccttagtcacaaagcccatcataatataaaacaggatggtggcaggaaaatggacatcaaaatcaacttaagggtaggctcaaaacagggttgttgttgtttttttagtttctccttgttgtgattttcacctgttataataaatgtaccttcacaccaatagattgggcactgtggaatttaaatcactcaaattgttctctaatatgtaaaattacactttgaactactagaaaattgtgctggaaatggacacagtctaacaaattccaaattctcacagaagaaggaaattgaatttccatgagttacactggatgaaaatgttcccttcaagtataatattaataatacctatat

SEQ ID NO: 15887 - DNA, 1553 bp, Homo sapiens
cttcacttttgggctcaaggactgtgtgaaccaacaaggggccagttttccattgttgtggtgaactgtcaagtgcaatttgcaataagttatcatgaaaagtttttagattacacgatcgcatatgctgcatttcacgttttattggacattttaccccactgagtggtaaaaaggacagaggctacagatggagttgctttgtttatgaaagtattttggtttgttttctttcatttaattgcctcatatttaaaaaccatgggtccactgttaaaaccacatgtgtatgtgcagctttacattttattttacgtgaagcatgtgattaggaaaactcattttcttttcaagcctcaggacctacctgaagagaagttttcttgtagctcaagttgtgcatgaattactgaatattttactgtgcttttcttcatgaagggtacatgctttgtactcttcactgaaagctgaaaacatttcttgttaccctcttttgtgcctttttattttgccaaccgtgtttatagaaaggacattactaatgacattttgcagattaaaaacattcatttgaacacagtagtcccctagaaaaacaactctacaaaaattttgcagccttattcattataattttgataaaattaacacaaaatcagtcaagaaggaaacatgtatattagtgaagtgtttttggagactgtttgaatgtgaccaaatgtggttctagttgacttcttttcactttggcttatatcaattcttgagagttaatgtgatcatgatattgcaaacaactataaatggtctctaggccttactttgtgattatacgttatctccggctagaaaaaaataatggtagtaaagaaactgacaaactgaaaataagaaaacaaaaatcaaatgcctataataccataatgccagtttggtatagagtccaactttaaaacatgaattgctcgacagagttctattcagtaggtgtttctttgtattgtcttttgtgaatttattatgaaaatgctgcgttgtgttgaatgaaaaagacccaaattactgcttatgaagaaataaagccagcattgatcacttaatcctgtttctcatgtccagccagaaaaaagaacttcagtgaaggtaagataaataaatacatacacatatgtttttttggtagataagtgctaattacatatatgtaatgctttattaaatttctgaaatatttggtaactaaaattttctttttggaaattaataaatccagatacatattaatgttgatatgagtaaaaacaaataggaagaaattgaaatttcttttcatcaacatgtagagctgctattttactatttggagaatatgatgtgaaaattggacctcaaagggtttccttgtgttttcattgtaaaataccatcatcagtgagagtcttgagttcactaacattgtcaccttctggagagagagttaatggggggcattgaggatgatatttttttacatgtgtttggtttctgattcaagtgacacgcacaaactg

SEQ ID NO: 15888 - DNA, 212 bp, Homo sapiens
cccccagaaccagtgggacaaactgcctcctggaggtttttagaaatgtgaaatggggtcttgaggtgagagaacttaactcttgactgccaaggtttccaagtgagtgatgccagccagcattatttatttccaagatttcctctgttggatcatttgaacccacttgttaattgcaagacccgaacatacagcaatatgaatttggcttt

SEQ ID NO: 15889 - DNA, 1690 bp, Homo sapiens
aaaaatgccactgtttttatcaagaagggaaatatatttgaaatataaaatattaaaattatgctcatttctatttttaaaaataatttaagaaattttacccttgttttcccttgttatggctcttctaattctcatttaattttaggatgtaaaaagtatatttttgcagaacaggcagcagcaataacttgtttctgttcttatgtaaataagaatccattattcgctcatgtggaagcttcttttgcatcatttgggactgccatttaaaaaaggataggtaaacaaagaaatgacaaaaataaaataaataaaataaaaatggataggtggtgacccactgagcctgatcataatacgaagaccagcttctgccactgcctttccagactcttaccactgcctgttgattaaatctaactcttcaacatcctagacaggcccttataatcttgcttcaaatgctgtgcagccatcttgcctcaacttccctctcatttgcctacagcatctcgggacgcttctgtgtttcccaagtatacgctgttctttcgctctttgtgcctcgccagtgctttccatgtgcctcgtagagttatttttcttgaagaggcagctcaaatgtcaccttctccagaagctgctctccacttgctttaggcagagtcagtcacttttcttctagattccaaagtgcctgatccacttggttgtggattcctggagcctagcaccacaccagaagcacgaggcccttgagaactgtgtgttgagtgaactaataactgtattatagaaagcataatgaaaatgtcctgtgactgaagtatgtgtagcttgttgcaggagttcacaggaaagttgactaggattgagtgtgttgggctttgggtataaaggagggggattctacgggggcagtagctcaacaaggaatagagggaggagtgtaattttggtagctggtgttgaatagggcctttgagaatcagactgaacacagtgaaatatgtgcccaaagttcagaaagatgaagtttccagaaactaagaaggtagcacaatatgtggcatcatactcagaaaggaagaccatgccatggggccagaaattcagaaacgtaattcttacattgtgattgcaatggatactcatggaagaaagtgggtagtggccgatttgacttcagagtgacaggtagagaagggaagagcgtgtagaactgtggccagactttaggagtgtgagggatgctgaatctcccagagagctcacactggccaggaatgctgagagtagcagatgcttttcttttgggaggatagtaaaacaatttagaaccagatatgctttgtcttgattctcaagtagaataatcttcaaatgcaaaagaatacattagaaatggacaaaagtggccaggagcggtagctcatacttgtaacccagcactttgggaagccgaggcgggctgatcgcttgaggtcaggagttcgagaccagcctggccaaaatagtgaaactcacgtttctactaaaaatacaaaaattagctgggtgtgatggccacttgggaggctgagataggagaatcgcttgaacctgggaggcagaggttgcagtgagccaatatcgtgccactgcattccagcctgggtgacagaatgaaactccatcactccatctc

SEQ ID NO: 15890 - DNA, 503 bp, Homo sapiens
aacggtgcgtttggccaaaaagaatctgcatttagcacaaaaaaaatttaaaaaaatacagtattctgtaccatagcgctgctcttatgccatttgtttatttttatatagcttgaaacatagagggagagagggagagagcctataccccttacttagcatgcacaaagtgtattcacgtgcagcagcaacacaatgttattcgttttgtctacgtttagtttccgtttccaggtgtttatagtggtgttttaaagagaatgtagacctgtgagaaaacgttttgtttgaaaaagcagacagaagtcactcaattgtttttgttgtggtctgagccaaagagaatgccattctcttgggtgggtaagactaaatctgtaagctctttgaaacaactttctcttgtaaacgtttcagtaataaaacatctttccagtccttggtcagtttggttgtgtaagagaatgttgaatacttatatttttaataaaagttgcaaaggt

SEQ ID NO: 15891 - DNA, 4248 bp, Homo sapiens
tttaattagaggctaataaaggcagaatgtttattgtgaatatgtaatatttgttggctgggccacgtaacttgattagtcattaaaaatcttgtacgtatataattcaaagattatatcttgttattcagtgcatgatagcaagtgtgtgattggccatagcttttaatatactgctgcccaggctggctctgaatttctataaattagctgttagatctgctgagatgactttcttccatatatgtggttcattggaagttctttgtaattttaattccatgaaagtcttaatgtttccaacatgaaaattctcttacttaaatacgtttgatttctgaaaagcctacaaatggaggggaaatgagattgtgctaatgttgatgtcatcaaggtaaccatctcatatactagtgtcaaaaggtttatgtaaacttgaattttatctgaactaaattgtatcttaaaattcatacaattatttattagacagtggaatgcaaatgtttctatgaacgtaaacacattcatagagatttcttggcgaaaatatcttgagaatagaatgtaacgatataacattttgctgatttgtgcaagattggggaaaaatttcttctagattgatgaggtcaatgtgattcagttgtgttgctgtctgagccacagccaattgtgtgtgctctattaatatgttaccattatttttgattcctggcttggtcaagaacaacctgatttttttttttttaatcttgcagaaaagttgattgcaaagtgtggtagaaaaagaaataatggtagcagtagagaatttataaataagagtttatctttatgaatgagttaattgttctacaattttgatcagtggtatttaagcctgtatatgctaagtgtatttatgcccctttgagccaaaatttttttttttttttcagaatccataagagtttatttgttggcttcacttgggtttagatgcaaattttactgcatcacaccctgatcagctgggtatttgcttagtgtattcatcaaatcttcagtgccagtttccttgagaagcagctttcatgcttattccttaaaaacaacagaagagtgtttatcctgagattggtattgcactattttattttattctgcaaatctgtatcctgaagtgtacatttcaacccatattcttctctgttcactgaaattaagttgaatttgaatggctgaaagacaaaatatatgttaatacaatctcttacctagagcattcaaagcctggctgtctctgtttgcacatgtaacagatgcagaactgtgtttgtaattctaagaaaatgtatgtcagaaagtattttatcagatgtttaaaaatctctgcctgttgattcataagggatatagacagtactttaacttgtgtttccagataaggcagattttggtcatctttctgtgaaagtatctctaactgaatccacttcttaaacaaactactctattttaaataaggaaagaatggagaatctagacattttacaggtgtatctgagcaaaatatatatttgggttagtttttatcacattatcacgtttgtctttatattttatcttcatcctaaattttctccctatcaaaacagcaggaaatttttaaacttttatattgtacactatttttgcataaaataagagctgtagctaccaaatactatttactacttagtaaaggtggcttctgtgtattaaactacgaattacaaatatcacttcactaaccactataattatttttggctttttcagccactggaactttttttggggggatttaaatacaggaaaactgtttaagcaaaaaatgcactgctttcatgtaaaatgatataatcttctttaacaaatattttcttcattgataactgacagatatctcatagcattaacataaaataccagaaacaaactttatctccctattcttacatttagtgcaaattggaatgcgtatgtgaatgttagaagatggacttaatctctgacaactttattaatttctctagctacagcaatgctatttaaaagccagttaggtatgaatagtacagtaatagtttgggttctcccttgataaatgaataaaaggctcaattctgataagtgatcaaatttcttgaaattctttcaaatcagctgaaaatttggttggggtgaattgatggtttttgagaagtaggccaggtatcctcacaaagaagttttagaatagggtttcttttaagtttttaaatatcatcctttgtctttccatatggttttcataaccaaatacatgactatagcatggttatttttctagtactgccatttgtgatatagccacatcttggcgtgcaagctagacatctcaggtaaatttgtttttttttttttttttagccctagaggtaacattataactaaaatgcattcctgcaattctgtttgcagtgcttcactaaacattgaaataaagttgtaaattttttcttcagtaatccattttatagttaatcataccaaatttaagttgatgacctaaagtccaggtagtgttgaagatagtatgtatctagaatactggtaatgagaaattgttgtaaattgaagaaaacaagatgctgccatatattaagatagaatataattaactccatgagaatggttactcaggaactagttaaagagcaaacccatttctcccgcttcactctgtttcagatatttttattggaaaatgttagggtagaggcctgagaaagttagcaaatgctattgactgatactggctctgtgtcttccagtgatttttagtttggtttttacagtcaagcctactgcttgcaattaagatatcaatctgaaatgcatctgtaattcctggccacaggtccttattgccattatttttaagtatcttcattggagatgaacactgacttttgcatatggtctcttacctcagggaagatcacttgctagcaactcatactactaatgacaggtttttgagaattgtactgacatcacatgttagctactaaatgcaaaatgtataaaagtattgttttatgtagttacctaccaatactatctgctactgaataactctctaaatatgtagacctcactaataactaacctttaggtaaaaaatttacttctgtcattaattacacttcaactggtcaatatagtggcagcataaagtgtttatttcagaatatcaatacagttttgtcttcatttttcaacagtaatttcaattggttcatacttaaaatactacacagattttgagttttatggttctcaaagcaaggtttccatcttaagatttttataaacacaaagcctttgcaaaattggattaaattccacctatcttaatgtgaattaaaaaccaccatttataataataatagcgccatattctaagttgagtaaatgcatcctaccattcaaggttatcatataatttaacaaaattgtacaaccttaaggctcttcacagtataaattaatttttcaaaccagagctgttcacatgaaaatattccttagtagaatgtatatttaagaaataaaacaacaaaggggaactatatcacccatgtaagttatagagttaattacaagttctaccattcttgataattctttgagatgctaagtgtttcagttcatatttaatgatacttaaatcgtgggaattttaatgtttgttccaaaatagcagaaattgtaaaaattatgaattattggagaaaatgccattacttgtatatctgacatttaattttttaattatggagactacatgcttttgtagtataatattaatgattattctcttgtaaaagaaaaggaaaaattagtaaagaaaaaagttttagttgatgttacctgcttgtgagtatcaattacttagtttttaaatttttaaggtattgcctacttttctttagaatgcagaaatctcgtcctgagcccttattatgcctgtggtagagcaatgcaagactgaaaaggttgccagtattttcaggcttatttgactaagaattagtgccaagaactggaaagtctactttttggagggaaatgatacttagaatttgtaaacataagcagtaatagtgtaaatatttagaaaaatagcaagtgctttaactgctcaataaaatagtatagatgttatttcacccttaa

SEQ ID NO: 15892 - DNA, 251 bp, Homo sapiens
tataatttttaagagaatgacacctagttaactttttggttattttaccagcaagctttcagaaatataaatctgacatctggatctgtgaaaattgtcaactttaaattcaatattttgaataagagcaaaagttaaaattgacaaataaagcatgaaaaacatctgctgttcagaagtaattaaagcacctgatacttattccttaaggaggatattttgctattaccaataaaaatggttagtcataa

SEQ ID NO: 15893 - DNA, 150 bp, Homo sapiens
acagtctctgagaagtactttacctgaaagacagtatgagaaaaatattcaagtaacactttaaaaccagttacccaaaatctgattagaagtataaggtgctctgaagtgtcctaaatattaatatcctgtaataaagctctttaaaat

SEQ ID NO: 15894 - DNA, 1272 bp, Homo sapiens
tgggaacttaatatttttgttggcatttacatccctctgctctttaaaaggacgctggagctgaggtttcctacctgaaaaatgatttctctggattgcagtgtctgagttactggtaaagatgcttagaagtcttactcaaacttgcaacactccagtcccttttagtgctggtggattttgtgtgttatattggcctcatgttgagcagaaagcctgtttaaacagtgtcagctcatgctcacgggtccttccctgtcttccacggcaggaaaagccccacgtttttggcaggtgtggaagtgaaacttacccaaagaactatagatgtaaagattgaacttctacaagaagtacaactcaggagagctgtattttgaaggataaaatgtttataattggggagtggggagagaagaagaaattattgttcatggtaaaagatatttagcaactatggtattcttattctgaagatttttgcacactcaggctatctgagatactggtaatcatcctgtgaaaaatgtacagagatgcaggtctgtaatataaaaatcttaaaacattatatagttcttcctgcactgttttctttattttcttattcatttgctaaatacccataatattttgtcaaatgcactaaacatttgggtggaactttcttttttattttatagggatttttagttttgccctttttggtaggtggtgattttgaggctgtaacatgcccagaagctgttgtggccgacacttcaacaatagggaaaaaaaggtagaaaatatccctactgacagtaactacctgtcacatatttctcttaggacttttaaagatgagccattaaaatagaatgatcctttatggaccaaaacttgaatcactgcaaaatgaatccagattgctgtcattttcttttcttttgggtggtggggcttgatgtagattttactctatgtacagaatttaacgttgaatatattaaaataacaaatctggcatggtttgcggaggttagatttactggaaatgtattcatactgtgaattgtgctctgatggttaaaagacaagattgtcaagcattccgtattaacagtggatgtagaaaattttttcagatggacaaaatgtatatggtacagatgtaaagttttctatgtaaaaaattctgtacaactttctgtacaatattgattcccatctggcatattctaatcaggttataggtcaataaagtttttgaattatttcatcagtgcaatc

SEQ ID NO: 15895 - DNA, 331 bp, Homo sapiens
gacagcccaaggctcaggtcaactgccataggattctgagcaaggcctacttggccctggatagaaattgttttcaaagagaagggcagctgcttagagtgaacatgtctatggactttaaaaagaccccacgcaatttgactttgtggcaatagaaaacagtaaaaaacagggcatagcctagtttgttataagaaaaagcatccattttctatccttttagagtcttatttgattatggtgggagggaatgttttcaaatttcccatttctcaagaaatgttcatattaattgaggatttcccttcaataaatctcatgtcctcaatta

SEQ ID NO: 15896 - DNA, 526 bp, Homo sapiens
agcttgaaaatggaagaatttagttttgttggttgaattgaaaatggcgacttgagaaacaactgtgccttcttttctttctttcttttttttaacctctacagacacaatcctcaaaccaacaaaactcagtatacacagccgctattcattgagggctggatacctcaacaagactgagagcctttccccgcttctctccaagaaggagacgttcagctagatttgttcccatttccgttgtgttaattcaaagctcatgctcccctacggtacaggctgaggtacacggttagcaaaaccatgggaaggggaatggcggtgcatatcattaactaacactccaaacaaaggtgagcttgcccaggacttggcatttccaaatcaaagtttttagatatgaacacctactgtgagttctgctacaaagcacaaatgaatttgtctcaactatgcaatttgattggaaaaatgtatgtgcagcatgttacatttactttcacggaataaagcagatatgtttctg

SEQ ID NO: 15897 - DNA, 287 bp, Homo sapiens
ccctgccaggcacaatgactcacgcctgtaatcccagcactttgggaggcagaggtgggtggatcactcaagtccaggagttcgagaccagcctgggcaacatggtgaaatcctgtctctaccaaaaaaatacaaaaatcagctgggggtggtggcacatgcctgtggttccagccactcaggaggtcgaggtggcaggatggtttgagcacaggagacggaggttgctgtgagctgagatcgccccactgcttttcaacctgggtgacagaaccagaccctgtctc

SEQ ID NO: 15898 - DNA, 1600 bp, Homo sapiens
cactgctgaagccagttgcttcttcagctgaccgggctcacttgctcaaaacacttccagtctggagagctgtgtctatttgtttcaacccaactgacctgccagccggttctgctagagcagacaggcctggccctggttcccagggtggcgtccactcggctgtggcaggaggagctgcctcttctcttgacagtctgaagctcgcatccagacagtcgctcagtctgttcactgcattcaccttagtgcaacttagatctctcctgcaaaagtaaatgttgacaggcaaatttcatacccatgtcagattgaatgtatttaaatgtatgtatttaaggagaaccatgctcttgttctgttcctgttcggttccagacactggtttcttgctttgttttccctggctaacagtctagtgcaaaagattaagattttatctgggggaaagaaaagaattttttaaaaaattaaactaaagatgttttaagctaaagcctgaatttgggatggaagcaggacagacaccgtggacagcgctgtatttacagacacacccagtgcgtgaagaccaacaaagtcacagtcgtatctctagaaagctctaaagaccatgttggaaagagtctccagttactgaacagatgaaaaggagcctgtgagagggctgttaacattagcaaatattttttccttgttttttctttgttaaaaccaaactggttcacctgaatcatgaattgagaagaaataattttcatttctaaattaagtcccttttagtttgatcagacagcttgaatcagcatctcttcttccctgtcagcctgactcttcccttcccctctctcattccccatactccctattttcattccttttttaaaaaataatataagctacagaaaccaggtaagccctttatttccttaaatgttttgccagccacttaccaattgctaagtattgaatttcagaaaaaaaaaatgcatttactggcaaggagaagagcaaagttaaggcttgataccaatcgagctaaggatacctgctttggaagcatgtttattctgttccccagcaactctggcctccaaaatgggagaaaacgccagtgtgtttaaattgatagcagatatcacgacagatttaacctctgccatgtgttttttattttgttttttagcagtgctgactaagccgaagttttgtaaggtacataaaatccaatttatatgtaaacaagcaataatttaagttgagaacttatgtgttttaattgtataatttttgtgaggtatacatattgtggaattgactcaaaaatgaggtacttcagtattaaattagatatcttcatagcaatgtctcctaaaggtgttttgtaaaggatatcaatgccttgattagacctaatttgtagacttaagactttttattttctaaaccttgtgattctgcttataagtcatttatctaatctatatgatatgcagccgctgtaggaaccaattcttgatttttatatgtttatattctttcttaatgaaccttagaaagactacatgttactaagcaggccacttttatggttgttttt

SEQ ID NO: 15899 - DNA, 1494 bp, Homo sapiens
tgaattataaactaattgattaatgtccccaaagaaatctgctttctactatatctttcagcattagagatttttctgttcttgaaaatacagtctgtgctctttgatttttgctattgtacggtttcatgcatttttttaaagggcatttgaggggaggattattgctatgaatgaaaaaaatattttagcttagactaagctacctgccttcaaaatagtttagggaccaccaccatattttattttgtttttatttttgaacatttttctaatgatttggagagaaaactatttacaaaaattccacatatcagtgatacaatttcttgctgtcaccaattttttataatagcagagtggcctgttctaagaaggccatattttttaagttatctttcagggtaacatggaaatactataaagttggatgtcaaactttaatatgttttcagtgttctctaattttttggaatttttgtagactttacacctggaaaaaaagatttgtaaaatcaccggaacaattgtgtgctttattttataggtagtggttattagtattacatccccattttaaaaacaaaaacataataatcgttacaacacgtggagttttactaacatacatattaaatcaaagtatattcttaaaagtacttgtgaagtaaaatctttcttgtgcattttcaatacttgtaaactggaaatcagaaaatatttactatgaacaggaaaatctgacatatagccctttttgatatgtttattaataatgattcttaatggggctcataataagtttaatatgcacagcatcttagaaaagtttaacctgcaaacacttttaaaacataatgcctacttgatttatatctataaaaagactgacaggtaattatatttggaaaacatttaatgcactaactttaaagaaattgaaaattcaggtggataaatagtcttacaaaagacaatgtgctttatgttatacctatagctttggtcccatctttaattgagaaacatttatctgtataaaacatatttttggataaatatatatatatatatttgtatctctacagaaaggctctaaaaagcatttgaggaaaatatttggttcccttttctataatcatcctttaagattcttatagctacatttggtttattcatcatatttacagtatatatattgttcttttcagtgttcacatcttgttccccatttctcacttgtgtcaccagctgtttgtgccatttttagtgtaaaagttgcagacctattagatctgcagtttaagttgccatgctgctaggaaattgtcctttttctttctagctgttaacctacttcctggaaaaagtagtagctctctgtagcattatggagtttcagtggaaccaaatttttgccattaaaaactggcattatactgaactatacattgagaaatcaatcaaaataaaaatttttactttcacaagttg

SEQ ID NO: 15900 - DNA, 603 bp, Homo sapiens
tttcagattaaagaaagctttgttttattttgctttcagagaatggtatgttttcttaactataggttattttatagagaatataaaagtataaaacattaaaaataaccctagatatactttaaaataatgttatatttatgctaaaatatgtaaattacactatacaaccatatgataggttatttctctaaccttgtcttctaacgttttaccaaaaattcataatctaatagtttatcagttttcaatagattaaataaaatgattactttaaaaataataaaatttatctaatttaaagttgatattatttttggccgttagttatctattactagtgatcagttatactgttttctatagctactttatttaacagcacagatttctatgcacctttactctttcctcaacccttgtctctatctgtacataattgctttgtcttgatgtttctatcaactatatcatgactatctattggttccataactctgtatcatgtgtattttcttattctggtataccacaaatgattcatgcaaatgaatttttggtgattgaaaaatattaaattcccaatttaaagtattatatgat

SEQ ID NO: 15901 - DNA, 1905 bp, Homo sapiens
cagcgctcggcactttgacagcgcacagctgctctgtgaccagggacagatccagcaggccccagtctcgcatcagcgccggcctccagaacttagcaatttccgcctggtgatgcgcagttgctgtcagtcttgacctctgcctttgtggtgaatggaggaccacgtctatttcatcagaacagctgttgactctagtactgtgaatccagtgaaaataagccatgagaatgttttagcacagcgttatgtgtctgccacattaactacacggttcaaacctgtgaagaaaggacctgcaaacgcttcagttgttagcattttcaatgtgatataaacagcttctccaatacagcaaacctaattgcacaacagagactgaaatgtgtttcctgaataccagtggaggaattttcttgtaaagaaggtttactttttggtgtctcatacccagggtaatctgtacatctctacttatttatgaacagactttttttaaaaagataaaaaaacagctttattgaggtataattcacccaccagacttttttaaacatcaaataattgaagagacaatagcattagaaataagtgattaaaggcctctgcctcacaacatggcaagtacagtactttgaattttagcacattgcatagtagttttaagtatgtctaatttaaacgtataatatgtacatcactgagacaatcatgtacagaaagaatttttggtgtaaatttgtaataatggataattcttttacatattgtttagggaaatgatattgaaaggtagcaatgcctggatagtgaagcatgaggcagcacgtgcacaaattcatgtgccgtgccttatctgagttttcggtataaatatgtagataatggattttttttttttagataatgttgtcaagaccaaaagcatggatgtcaagtgtcagtaaggattttgttttctaaaattttttcctgcatcagttcttctgagggccttgatgaaataacacagcagtttcttaaacaatttgaaacaaaatgagctctcctaccacctcactttttcatttccacactaatgtattatatgtaactacttggaaaaaataattattcaaatgcttcttcccacaaagaatatagatgatagtagatatattttattaataaaatggttcatgaatcggagactaacaaagttttcatgtgctcagaattattaattatcgtgtctgcattttctttcgataaaggaagacacacgatgctaatccggaaatcagcaaactttgcattactccctatgtgcgtattttctctttcttcctgtcaccctgaggaaggttcattgccattgtcatcaccatggaaacaacgttcctctccacctgcattatgtactacatgacaggcatcaatctggggaaataataaaattatcacctttgtcagaccataagagtttctccaaaagtggtcagtttggctgggcaatattttctctcatctaacaaacacaatccattgtcatgaaattacccttaggatgagtcttctttaatcaatcatatattgggcgggaaaaacaccagctttgacccgaagtagttgaagagctacttcattcttttctgaagttgtgtgttgctgctagaaatagtcatttgtgaattatccaaattgtttaaattcacaattgaattagttttttcttcctttttgcttgaagcaaacagttgacaatttttaaccttttcattttatgtttttgtactctgcagactgaaaagacaaagtttatcttggccttactgtataaaggtgtgctgtgtccaccgttgtgtacagaatttttcttcattaattttgtgtttaagttaataaaatttatttgtgatgtactgt

SEQ ID NO: 15902 - DNA, 1118 bp, Homo sapiens
atcggactggaactcacttgatgggattattcgttaaatgcgagtgtttgggggccacggagagaagggagagctcgtgagatgggaagaagtttccgctggattctccttgacccttcccctttccctggaactgtgatcgtgacaggtggcgggtgtggctgtcactgcacagcgcccacggctacagctgcgccggatctgggcgaccacgttttgcctctccaaaaagagcttcctttcgtgacgagacgcggacgcaggtccaccctcgggccctagctctgtagactaactctcggctgctgccccagcccgcgccagacagcccacggatccgttctcagcggagccagattcatcgcacacgtgcgggacggttccacacagccccggcctttcgcggtgacacaatggttagggaacggttagaacgcgctctacatccgctttaaagacagaggtctagacgtgagatccgcgtcgggacagggttttaagtgacaaagaagggcgagtggcttctctgggccgggttcgtactccagcacagcgcccttctaacgggcgggaggaaggccgctgctcgcagggctaggtggagacacacttcccagatcaccgcaggcgggttttacccggagagctctgggccgttcggcctccctgccgggtggcttcttcaatcccgtctccttcccaagctcccggctttttctaatcaggcaggcgtctgtcaaccctctccacttctgggctgaagcctccccaagccccgctgcgccaacctgtgtggggtcttcttcgggcctccctctccgccccgctcctgctcctacctgcagcacccccagctccgactccagactctctgcatcaggtctccccactccacgctccgggcgccccaactccaacaccacgtcctgccgcgcaggttcttccccgcgcggaggagcgcgcagggtgggcggcttaccatagcaagtgatcctgcgatagggaacgcgcccttgccccgaggctgcactaccacaggaaataacatatgtaaataaatttatttttttatgaataataaaacgcgctgtaaaaaccgtgtgccccttggaggtgtc

SEQ ID NO: 15903 - DNA, 1654 bp, Homo sapiens
ctcctcagaccttcagtgaggcttctaatggggggtgcatgacttgctggttctaactttcaatttaaaaagagtgaggaagaagcagaatgattcattttgctgcgtgtgaaatcatggttcctgcatgctgtataaaagtaaaccatcttttatcctctattcatattttctaccaatcactatgtattggggatatctttgcagatatgttcaaattggactggactttgatgagatataatctcattatttgaatgggtagaaaatgaatttgctagaacacacatttttaatgaaaagaagtaataaatgtaactattaagctaaaatgcaaatgtcagtactgaattcctgcttgttaattacataatatgtgatgctctagaaaatagtcacaagtattaataatgccttagatgatagtcttaaatattaggttgaggtctacctaacctaagctgcttcctggaaagcttcatgttgaaagaacctatgggtggcaccatgtggacttttctgtccctactgtgatgaatagccccacccttcttgctgtccccaacacacctgatgtcactttgagccatatagttgaagtacaaattaataggccttatgatatgcacgaattttactatagataatatatgttgtttctggttttgtttgccaatgagcataataaatgtaaaacctatatagtatccctgtgattattgtatgagcctttgtttgagatttgaaaacaacatggctccatcacatattcccttttttcttttgatgtctactcaaatcatgaattaatcacatacctcatcattaatcttttcaaggtccttctattgttttgtctgattttctccatcatcctgattagcatgtttattccctcactacccccaggagatattcactgtaatgaatatgtctttggctatgtatgtgtccttgtgttatgttgtacagtgttgttttgagtctgttattatttacacagatgttattatgctatagcttctatttctgtttttgcttcttatttctcttataattctcacttatttcctattttttctactcatttctatttgttactcctttttactggacatgatgtttacaagatacaactgtgttactgtattccatctagtacggggcctttggtgtggcttactatttcattgtgtgcacccacccacccaccacactggacttttctagagatggacagcttggttacctccaccttcctgcactcattctcaaacatactgatgttcatacaaaccagcagagtgctgagggacgatatgtactattacaaaaccagacacttttacattcatggtccaacagatcacatggcctagaggcaatgttgcatataccttaatctttgatatgaataatatctttgttctttatatttcttaaaacagaaagggtggaaaatcactatacagaagcaatatccaaagatctcctgatcataaagacaaggggtcttttcagtcttccctctcctcaaaccttgtgtagcattgcacaatatagatctcagtcaacattcactgagtgccaagaatgtgagaaacactgtaccatgcctgtcatgcgaaatatttaaataaacagattgtcttac

SEQ ID NO: 15904 - DNA, 321 bp, Homo sapiens
atggtgatataaatatttccaaatgcatttgtaaacattctaaatattctcaagtcatgttcaatgtttcctaaaccttcaattttggccaaagtccccaaacacatcattgccacactctgaagtagagaaagaaaatttaggggccagttctcaaggaacacaggtcctttatttttattttaactaagttgaagacccactcaaaaagctcttgtggttttatgttcttgacctttcaactggagtcctctcattcagcaggtggcccgtgagacacagaatacatgtctgtttgctaaagtaaaattactgtaactc

SEQ ID NO: 15905 - DNA, 66 bp, Homo sapiens
gtgtctaccatgattatttttctaagctggttggttaataaacagtacctgctctcaaattgaaat

SEQ ID NO: 15906 - DNA, 2400 bp, Homo sapiens
attaaaagcaaaaacaaaaaacaaaacaattcattagcctcagattcttcatctgtatacatcacaaggctcattcttgcctgctagtatggcctacatgccacttacgttttaagttatttaggaacacaaaggacagacaaaaaagccatatgcacatgcctcattttctcttatttttgatctatctagtaattcttttgctgcctgtctcttctccattttccttcttcttttttaagcatttttcatattcttcactgtcttctatttggtcttgattaggtgcatctatctcttcgctctgtcttccacaaacaaaaattctgccttcagacatttggtgttagtatttcacactcagttctccctttttttacataaggattgagtttctttttatgatgattttacctttatagcaattttgaattttgcattctattgctagtattgattcaggtacaccattaagatacaacattctagaagtctattaccttaggagttaattaaacatgatatttgaagaataatgaaatgctttatagttgtttgaggcataacaatgtgtatttgttttactggatcatgttttgaactgactagggagggtagcacctgcctcagatagtaccaacaattctgtttcactgggtagtctaaaactagcttatagtttaacttaacttgttgtgtatgtgaatttagggatggaaactttttttcccctatttattctttgtttccttctgggaaaaaaccccacaaaaatcagcactcctttatggatacattggagcttttgaaagaattgtaaactctaggaaggggaaatatctgtgtcttgatttcttagttgccttgaaaatcatgtactgaactgtaaccgctaacttgactggatgaactagtttgcttgtgtgtagagagtgtattgcttcctcagatttcactgttttcatctccttttccatcttagtctttattccttaagaccaaaaactgtaatatcctttagaaatgctctagaagatctgtattgtgtagaatgatcatgtatttataaatattttacaagtttagattataaaatgaaaaagaaggtcatgtgttttggggggtattttgcatgttcggatttttttttcacttcaccgaacccttctgattctttcaaactattgccaggtagttgttagtgtttctaattggactcttaatatgaacttcaagaagctgttaccagttatcggctctgtcatctgaaattttaaccacttaatttaaagttacaattttagaatttgtttttgttgttttaccttaagaaacacaataaatcactgtttaaaaaagatctcaatttatataaagtactggaaaaaagctaagtaatttttagttctatctataatctccgtaggatgaattagaaataaattgtgatgaaaagaaattaactgcttatttatgaatctaatcatttagaaatgtctgagagtaacactgcattcttatagaaacaaagcacaaattgcattcaagctctgaattgattttttgcttggagctgttgttacagtagctgtaattttgctaccagaatgtcttaattttttaaatttgtttttatttctaagctcttggcaatgacaataattataattttaacatatcttcactgtagtcaacatgtagagtctgcttccctcattattgcattgctaaggcctttttaaaaagcttatgcttacataatatactcttttttatggacacgttatatgtttccaaatctgtgtattgtgatttttacatactaatgaatataaacaggtgattttaaaatattactgtgcttctttggttgaatgagctggtattgatgtaaaatactctgtcattgatggaccactacctgcagctaagcagtgagcagaatctccgggaaatgacttagtctggccacatgcatagcccatcttcataatgtcgcagcagaaggttctttgtggttaaaagttttaaagcctatttctttataggtaaccctctcaggtatatttacctggtagaaaaacatgtagattgtttctattacttaaatgttttaattggactgtagtttagaaattacaggaccagcttgttacagattatacactattctgttacttttatttctgaaacttaaaaacaataaattctttttctgtgtttctaggttagaacttttttattttattgcacactgaacagatactgttgcttattgaatattgtgtaaacccttctttggctttccttgcccattgcaatttgatttaagcctactagagccattgtatgtgacagctatattgtattacaaagtaaaaatatatgagtgtattgaaa

SEQ ID NO: 15907 - DNA, 3497 bp, Homo sapiens
tgccactgttatcatcctcctagcagaagatagtcctactgagaaaatgagcactttgatcattcagtctttgaactttaacctttgactggaagtgacctataggcaatgaagactacttccttttactgcatttttactcgtgtgcattctgggcgcatgttgatcgctggttcagtccaggcaactgacatgcttttattagtcatacagtattaatgcaggtgtcaggaaatgtcaaatataattccattttttatttttatttttttaagcttttggaaaagctccaggtcctcatgtattgtgcaataacaatgacttccttggcggttttggtacgttcattgccggcaatgggcgttgtaacaggaaaagttttcattaactcctgccattcaatgattaatgcatgatagggcctatgaaatgaacttactggttatagtgggaatataaataaagtgagggatccaacattactttaaaagtcaccccaactgtttatatttggattctatgcactgtgatcctaaggttaacagcatgaattaacatgcgtctttaaaggactgtaatgaaagatcattgcatatttattgaattgtttatatctactgtcaagttgttttgacatggaagattttcaagtaacattggcagagaggtacagtatgttatccctatggtgaaaataaattaatttgttgtatatagttcctcaatctctgaagtaaaggtatgagtaatatagggtatgaatggtttaatcaaggctttattttggaagtaagaaaaatggcagtgatgattaaattgctgcagtccataatttgggcttgttatttgtacattaaagattttttccaagtaagttacactctgttaacttcctgctagccatcagcatgagccctactgcctaaacactatttcatttatttatgtttggaaaccccgtaaacatttttgtttgcaatcttgtttcttttgttataagtcaagtttgaatgttacaatacttttattgaaacttttgttaagttttttcttgtaaattttctttacttgtgagtatcatcttgtcctttaatcctgtaccctaaaataagaaatacatttttgacagaggcttaatgttttaacaaaagagtgtggacatttttattttaaaatttaggcaaaagtcactatcaaatggttgcttatttgtctcacacagccatatagtttttcctggagggttttgttttgttgttgttgaaaagactttgcttacagctagatgaaactttctatagaaaaaaaaaattgttgaaaggtccagttctcagtaccatgtgagttaatgatactacaactaagttctttttaaaaagtgattaatgtattttataaattaccttttcacatatgcaaaatctgtttctactacaatgttatttttactaatgccttattgttgcactctttttgaaatatcctgcagtgaatatatgaatcaatttgggcttaaaactgaaagccagttggctgaaaggtttgaaatacgtaccccagtaaaaccattcaatcaataattggtaaataatattttaaaattgtttttaatctgtatagatgacattttgtagctttgtacatgttgttaattaagggcatataattttacactcaaagtataattgctgaactcaggggtgggtagacttcaaaaatatgtctgctatagaaataacttgaaaaaaaaaattaaaaccgtggccagccaccaaattgtggacactgtttatatactgctagttaacaattaccacttttaaaaaattataaccgtttttgttctatcttgactagataaattctcacaatgatctctgtcagttttattagttggcctgtttaaccaagacagaaagtctttgaattactcatagttttaaactgcttttaatatgaaaattgcagctgtaaattatgtattttcatattttgcgtaactgctctacactactgtttgacttgatcttcttctgggggttagggagaaatctgtctccatattgctggttctcttaccaaaatgcttttataaagaaatgaccggtgacatttattcaccaaaggaattaatatactgagtcaaagattaacaatgctatactatagagtaataggtcatatatagcctcaattgagttttttatgacaatattttaacatacctctctctctacatataaataccataaagtaaactaaaatgacacagaggaaagtagaggaaaatgaaataatttcggtacatcttatggtttaaagagtagaaaataagatgaaatatcctaaaatataggagcacagacatttaaaattcataatcaggctaacaacactctcttgaatttaggaatcattgaaaactccttgcacttagatttaatttatatgttagttacattattaaaagtcataaggcatttatctgagtcattgctctacagagagcaattaatggcttgtaataataaaaagaatatttctctgtaatgcattgttgaaagacaaccagaatatcaagaaaatgtatataggaatatgctacttgcctcctccctgcatttcctcgtggggcactatttgcgacataggcctacagaattagactttcatacttagaagataaggtacactcttcttcttttatttatttatttatttatttttaggccattcttctggtttgccaaattctattaagacagtgatacatttgcttccttatttatgcatgcttagatcatgaacatgatgcccttcttttttttttttttctttggtcaagtagggattaatgccataggtttagagagaaggattgttttcagtttttaagagaattttttaaaaatacattttatggttctcttaaggaattaatattcacttctgaaggacttacttgtaatatataatttatcattttagccagcagggaaataaatcatttttaatccccagaagaaagtgctggaaatagcttctatatagtcagcagttcacctggagaaagatcttaattccttgttgttttgactaggaatatcaatatttggtataaaataactagaatagtttattaccttttccctcatgaaattttaaatatatgcaaatatatatatcattagattcctgtggtggataataatttcttcagattctaaaacaggtgtctagtgactgcttaattgtttccaagttgcatcaaagatgaattggtaaataatggaaatgagtagtgatatgaaaatggttatgtaactacatattacttgtttctggtaatcaagtcttattttttaaaagcctattgtttttcagaattgagatatttaaaacttgttataacttcttcctaaaaatagaagagaagaggaggtactgtgtgttacaaaaatttttttaaataaagaattcagtgtcactagttctaa

SEQ ID NO: 15908 - DNA, 231 bp, Homo sapiens
ataaaataaattataataaactgttaactcttttcagtatttaatacctgtagttcagttagtaactttttcatatatagcatgttgcctgtatgcagttgaactatataaagttcattgcaaagcagattatcttgtttttttgcatagcaatcaaagttgaaatttgtttgctacatcaacaaattaaggacattttcacaaactgagaaataaacaaatatgccaatt

SEQ ID NO: 15909 - DNA, 2330 bp, Homo sapiens
tgaagtcctgacaactagtggtgtgttagcccacagttctctgcagtggtgccgtcagccctttaaatggcccaccccaggcagactcagacacagggaaggaggcttggaattaggatgggatcgcgagagagatgaaacttggaaaattcagccagaggacctgttcggttcccctgggagtgctttgtggctttggggtcctctgggagctgaagcacacggccatgttggagagcaaaacttaataataattcttttttaaaatctgctgaagcagccccatccggcgaagttcttggcattggctactccatctgtcctagcagagtgtgactaaactggaaatgtatggagctgcattttttttttttttttgatggaagtcaacagctgccttactattttaccatctgacgtttttagtagggagctggggaaacgactgcccgaggaatgcggtcggaggattgtgttgctgtggacgtggttccaacattcactcctatctcattagaagaaataggtagcagcatcactcaccagtcttatgccatgacctgctgctttaacatctcctggaatgttctgggagagaacgtttcgtttgcttgtgcacgactctgttcatttttgctgtttatttaaatctgacgtatagtcatctaccacctgcggtcctggccggacgaaacacacgtgttgcatctcaaggaaaagaaacaacaaaatgctagtgaaaatgtgcttattttgatagcaatataccatcttttatgtcatttattcttcctatacttgtaaaaggttatttatctttaaaatttagcaatttgaagacactatgccttcctaagaactaatttaattctaaatatttttaacattactgaggtgaattatttatgcacttaggaagtgctaaattttaaaagctgaaacacaacagaattctaagaaatatagtccaaacgttgcatggattgcagtaatcagtgtttaaaggattcagtttctttgctgacgtactttacaaccaaataaaatcttgtcggtggctgtgttaattcccatgaaagttaagcaagatgctattaataaactgctctgctctttcttgttttctttttccaacttaaatttctgttgaatacattcaggtagaacataaagccttgttcaatcactgcctctcagttttctgcctttcctgtttttcaaagtccttttgtaatttcatttcacattttaaaggcttagacatttttattttaaatatgtgtcttttacagtcttttgtcattctgacatttctggatttttgctgttttataatttaccctttgttattcagaagcatgcttacttatagaaactaaatggtctttataaaagtaattacttaaaaagaaatcaggggaagaaagatatctatctaatctattaaatctttataaaacattacattgcagagggggagctactcctaaatattttcatgatttgcatggtttaatcagatttttttttttttttacaccatattagctaccttttcaatggagaagagacagttcacacaattccctggttagcacagatgtggactgagtgctttgtcacctgcagggtagtaacccagtgatgtttcttacagaagcacaatatgttgaaaatcctgggtgtgaccaatatggaataaagaagaaggcagaaagagagcaaatgaaaaatttcaacttgtatattcattttttacattttgctttgacttttaaatttaggaagtccgtttttacctgagaacaaatgtttaaagttcctgcgtcactctcagtactctcactgcccctcccaaaccctatagctccttacgctgggaaagctggttttttaaaaaaataataataaaatatttaatcttattaagtgttcatttaaaatgcgtaatgctttggaaataatgggtaacagatagcgagaggatatgtttataaagtgagcatgttggtcccatttataaatatatgtatgatttataagcttttttaaaacaaagctcaaattgttggtatttttctaaaatgtgcacagctgtattttacatgaaggctctttctaatgggttgttatactgtactcaacattttggacagcacatgaagtctgccaatgtacttaataaaacatgactttgtttatttaaagtttcttgctgtgaaaaagaactccctacctgtgagttcctttatttataattcttgaaaccaaaatgtataatgtacagttttcacaactgtatctgctctaataaaaaaaagttggttatt

SEQ ID NO: 15910 - DNA, 3003 bp, Homo sapiens
aaactaaaattgcttcctttgaggaaaaaaatgcaccgtgtttaaattcttaatattagtcatcctaagtataccatttatgtatcctttataaggaatgtgctcctagccactgtcttctcctttccaggcatgactgaaatctaatcactggaaaccatgtgattctaaatatattatgtaaatgttaatgtattatgttttttaaatcattgcattcaatttttaatgtcaagaataatggacagcttttgtcaggtgactactaacaatgctccttcattttactacttcttaaaacaaggttggattctaaagataaagattttggagactctgggatgagtgtgcatttattttcagagttgacataatatgataatgtgacaattatgagactgttttaaaccttaagacctgatgcctcagttgtaacttttttttttttttctgagacggtgtcctgctctgtcacccaggctggagtgcagtggcgcgatctctgctcactgcaacgtccgcctcccgggttcaagcaattctcctgcctcagcctcccgagtagctggcactgcaggtgcatgccaccatgcccgggtaatttttgtatttttagtagagatggggttcactgtgttagccaggatggtctctatctcctgatctggtgatccacctgcgtcagcctcccaaagtgctgagattacagacgtgagccactgtgcttggccgcctcagttgtaatgttatgcttttctctgaagccaatttttaagaagttcagtcctcagctgtctgacccctccacagttggctttatattcagaaagtaaaaattacttaaggcagcttggaagtgaggcctgggaactactgggggcaactagtatgaacagcactatttacaggtctctttctcttgcctttgattcagagctgtcattctcagtaaatattgatagttttattgaaacaaaaggggtctttagcatgggaatagtaacagcagtgcataatcaagataattctgtatccttcactctttttctctgcctttttttacttaaaagtaaattcagactcttaaaatggtatagaattattagcttgaacattgaattatctcgtcttaactagaatgttttttaaaaaacagtttttaaatgtttttaaataaacatcttgctagtatgatggaaatacactgccagttcatttttctcttcacctttcattgaacaagtactcaggtgccaggtactgatgtagccattagaggcacaacagtatattaagcaggaaaaatcaagttaccttcatggagtttacattctgtgattgaatgaactgtaagtttaatttaggttcaatttagtgtaagatactgaagaagttttgtagtttgagttaagagtattttacatcttaagaatttgccttcttttgccttctgtaattttaaaacattattgtagaaaacaccaacaattcaggaaaaaatataaaatcaactttcccacaattttttgagagagatcatcactatattttactatatttgtagatttgttgcacgtacatttcttatttacaaaattattataatgcataaaaaatagcattttttcctatgtataaatattcttcaaaactattttagggctgagcacaatggctcatgcctgtaatcccaggctccctacttagggaggctgagcccaggagtttgagttcgtttctaaaaaaataaaaatatatacaaacgtctttgttttttgtttgtttgtttgtttttggtgagaaagggcctcacccagtcacccaggttggagtgcagtggtgtgatcatggctaaccgcagcctttccctcccagggctcaagcgatcctcccatctgagcctcccaagttgctgggaccacaggcccataccaccatgcctggctaatttttgtagagatgaggtctcactttgttgcccaggctggtcttgaacttctgggctcaagcagtcctcctaccctggcctcccaaagttgtgggattacaggcatgagccactgcacccagccataatatatttttaaaatgctatgtatatgccatcatattcctattcctattattatttaaccaccatcatagagcatttaggttcttttcactttctgttgtgaataatgcaatgttgaatctgagttcattaagtgaagagtccagctgcacactgcaggcccagtctggatgtaggtgctcagatggttctctttgagacaggctttatcctttggctctcatttttttgatgagtgtacatggcatgagggacacagattccgctagaattcaaatcccacttgtgtataacctagggcaatgtgccacatctctgcacatctgttcattgtaaggattacatgtttagtgtatataaagctcttaaaacaatgcctgacacatagtaaatagaatataatagtagtgctttcctttgctgttgtcagtattactctgagtcggtttcattctcacacagaatgatggccgctagaagctcaaggcttataatctgctagctttctgatcccactggcatgagatactcttgcctaatagttacagctaaagtccaggagctcactgttactggtctgccttggattatgtgcacattcctgaaccagccactatagctaggggatggaaaatactgttcctggttacttaaatgtaggtgatgctcctcccatataccacatgaacctaaaggagtcctggaggaggccgttcaccacaggaaactgaggtgttcttagaagggtggatgctggcagatctctactagttagagtctacatttgccttactcatttcaaaagtccacattgcagtctcattttaccagtgatctagcttgataaggacattcataagtaactggatgattctttaacattgcagatttgaaaggattaaataaagtcaacaaaattgttatatcaa

SEQ ID NO: 15911 - DNA, 942 bp, Homo sapiens
aaaatatggagtggcaatatagaaacacgaactttagctgcatcctccaagaatctatctgcttatgcagtttttcagagtggaatgcttcctagaagttactgaatgcaccatggtcaaaacggattagggcatttgagaaatgcatattgtattactagaagatgaatacaaacaatggaaactgaatgctccagtcaacaaactatttcttatatatgtgaacatttatcaatcagtataattctgtactgatttttgtaagacaatccatgtaaggtatcagttgcaataatacttctcaaacctgtttaaatatttcaagacattaaatctatgaagtatataatggtttcaaagattcaaaattgacattgctttactgtcaaaataattttatggctcactatgaatctattatactgtattaagagtgaaaattgtcttcttctgtgctggagatgttttagagttaacaatgatatatggataatgccggtgagaataagagagtcataaaccttaagtaagcaacagcataacaaggtccaagatacctaaaagagatttcaagagatttaattaatcatgaatgtgtaacacagtgccttcaataaatggtatagcaaatgttttgacatgaaaaaaggacaatttcaaaaaaataaaataaaataaaaataaattcacctagtctaaggatgctaaaccttagtactgagttacattgtcatttatatagattataacttgtctaaataagtttgcaatttgggagatatatttttaagataataatatatgtttaccttttaattaatgaaatatctgtatttaattttgacactatatctgtatataaaatattttcatacagcattacaaattgcttactttggaatacatttctcctttgataaaataaatgagctatgtattaac

SEQ ID NO: 15912 - DNA, 1177 bp, Homo sapiens
agaactgatgtagaatgagggaggggaaagtttaaaatcccagctgggctggactgttgccaacatcaccttaaagtcgtcagtaaaagtaaaaaggaaaaaggtacactttcagataattttttttttaaagactaaaggtttgttggtttacttttatcttttttaatgtttttttcatcatgtcatgtattagcagtttttaaaaactagttgttaaattttgttcaagacattaaattgaaatagtgagtataagccaacactttgtgataggtttgtactgtgcctaatttactttgtaaaccagaatgattccgtttttgcctcaaaatttggggaatcttaacatttagtatttttggtctgtttttctccttgtatagttatggtctgtttttagaattaattttccaaaccactatgcttaatgttaacatgattctgtttgttaatattttgacagattaaggtgttgtataaataatattcttttggggggaggggaactatattgaattttatatttctgagcaaagcgttgacaaatcagatgatcagctttatccaagaaagaagactagtaaattgtctgcctcctatagcagaaaggtgaatgtacaaactgttggtggccctgaatccatctgaccagctgctggtatctgccaggactggcagttctgatttagttaggagagagccgctgataggttaggtctcatttggagtgttggtggaaaggaaactgaaggtaattgaatagaatacgcctgcatttaccagccccagcaacacaaagaatttttaatcacacggatctcaaattcacaaatgttaacatggataagtgatcatggtgtgcgagtggtcaattgagtagtacagtggaaactgttaaatgcataacctaattttcctgggactgccatattttcttttaactggaaatttttatgtgagttttccttttggtgcatggaactgtggttgccaaggtatttaaaagggctttcctgcctccttctctttgatttatttaatttgatttgggctataaaatatcatttttcaggtttattcttttagcaggtgtagttaaacgacctccactgaactgggtttgacctctgttgtactgatgtgttgtgactaaataaaaaagaaagaacaaagt

SEQ ID NO: 15913 - DNA, 119 bp, Homo sapiens
atgaactttgcttagtggattgactcctttgctgaagtcagttattcatcaagaatgcaattagactaattgtgaataaatgattgaatgaagatataataaataaaagctataattat

SEQ ID NO: 15914 - DNA, 3244 bp, Homo sapiens
gattcctacctttgttctgctacccactgccagatgctgcaagcgaggtccaagcacatcttgtcaacatgcattgccatgaatttctaccagatgtgcttttatttagctttacatattcctttgaccaaatagtttgtgggttaaacaaaatgaaaatatcttcacctctattcttgggaaacaccctttagtgtacatttatgttcctttatttaggaaacaccattataaaaacacttatagtaaatggggacattcactataatgatctaagaagctacagattgtcatagttgttttcctgctttacaaaattgctccagatctggaatgccagtttgacctttgtcttctataatatttcctttttttcccctctttgaatctctgtatatttgattcttaactaaaattgttctcttaaatattctgaatcctggtaattaaaagtttgggtgtattttctttacctccaaggaaagaactactagctacaaaaaatattttggaataagcattgttttggtataaggtacatattttggttgaagacaccagactgaagtaaacagctgtgcatccaatttattatagttttgtaagtaacaatatgtaatcaaacttctaggtgacttgagagtggaacctcctatatcattatttagcaccgtttgtgacagtaaccatttcagtgtattgtttattataccacttatatcaacttatttttcaccaggttaaaattttaatttctacaaaataacattctgaatcaagcacactgtatgttcagtaggttgaactatgaacactgtcatcaatgttcagttcaaaagcctgaaagtttagatctagaagctggtaaaaatgacaatatcaatcacattaggggaaccattgttgtcttcacttaatccatttagcactatttaaaataagcacaccaagttatatgactaatataacttgaaaattttttatactgaggggttggtgataactcttgaggatgtaatgcattaataaaaatcaactcatcattttctacttgttttcaatgtgttggaaactgtaaaatgatactgtagaacctgtctcctactttgaaaactgaatgtcagggctgagtgaatcaaagtgtctagacatatttgcatagaggccaaggtattctattctaataactgcttactcaacactaccaccttttccttatactgtatatgattatggcctacaatgttgtatttgttatttattaaattgtgattgttttattattgtttatgccaaatgttaactgccaagcttggagtgacctaaagcattttttaaaagcatggctagatttacttcagtataaattatcttatgaaaaccaaattttaaaagccacaggtgttgattgttataaaataacatgctgccattcttgattgctagagtttttgttagtactttggatgcaattaaaactatgtgctatcacatgtgaaaagcttaataaattccatctatcagtagtataggtctcaatatttattatgagaccagtggtctggaaacagcttgttgtaccgaatcaactggagtctatgcttaaaaaaaaaaaatttttttttaaccatccttaaattattgcttaatggtatcatattaacatattctaaataagggctttaaggcacaggctgttgaagcattttctcagaggagtggatctgtagaagtctgtctttctatagaaatattgtgcttactcaagtgttaaattattttttctatgaactagtctacttcttaaaattcaaacatattcttttgatcacattgtttcttgagcatcctgccctgctactaacttttcaacaaggcaaaatggagtaaagtggcaatttctttagatgagtgaaataccctcaagtctcttttctgcccaaaaagggaaaagtgatagaaatgggggtggcaagtggggtgagtggatgaaggtgggtattgggggtggctgtgaaagaaaataatggagaatcacttttctagacatctacctatacttaatctaagaaacaaagtaatctactgtaaagtactctgccccttgaaagaagtattaaaaagagtgaggatggatttagaaaaaaacatgaatttagaaatattcaaaatggtttttgtggcagattcaatattatgaattcacagatatttaaagaatgagaaacatagtaattagtagaaatgccagaaacagttcctggttcctcttgtgtttgacactaagaaaatagcaagagtgtgaaatctcagatacttatgaaatctcacagatgtaaggactcaagtgtagaagaaaatatccccttcttacaaaaagaaatgtcaatttatggagtttgtgggaaatagggcaagaattcttatgcttatgagagccaagtagtcagtggaagagagtagagctcaaaactggattatcaccttagcaacttagaatagtttgaaatagaaaaaaagtatttaatttggatctggatctgttaagatatgcacagtctattttttgtatagtattggaaaataaaaatgctataatttgggtatgggttcttttgtatacattacctgcccattgaggaaaggggcaagtccattatgcaacttctctccaaacccttcatattctggatatgatacttaaagagccatgagcagctacattctgcctatcagaaggcatttattaaatgactgcttgctgaagatgtgtccaaagagatcctacattaaggtcatttgtcagaatgatgtttgtgtttgtttagagttggctgacctccaactcctggggtcaaggaatcctactgccttagcttcccaaatagctaggactataggcatgcacccggccatgtgttttatttatagctcttaaagcccagatgaagaaatcacatttttgcccatagtgaagaaacatttggccattgattagtccttattttcagtgactgtcctgttttcattagattagagagaccctgtgtgggccacagttaatataaaccattatcacttttaagtaaacctgcacatcttagatttcataatttccttattgttctgactcaaaatgaactaagagcttttcactttttgtttgtaagttctcagagagtcgggtctgcaagtgcttttgcctgccaggattttgtactcaaataaatgctatttggcaact

SEQ ID NO: 15915 - DNA, 2832 bp, Homo sapiens
gagacccccaggcagaggggctcagggccctgagccgctcctgccctggcctgccactgcaggtgttggaaagagcttttcctactgaataaaacacagttgaagccaggaaaagccctttcaggaaccttggaggaataacagcaaaaacacagaaaaattgtttaagtcaccacctatgacaaaagaaagttgctcttactgagaacccagcttggagcagctataactagttttttttccttcaaaagaaaagtcaactttttttgctgtatgtctagacttaaaactgtggacttctgtagcaattgaaccaacaaagcccattttacctagaaaggaggcatattttgataagctttctgaattatgccattttcaagatttttttgacacttaaaaaacaagctacaggttattcagtagcatttgtacaaagatcaatacttacttttgttgtgaataatcttttccgtatcttccatttgacttcttggagcagtatatgtcaggatgtgttgcaagacagcgcagcactctgggcatcttttctatggctttttgtttgtttttcttttaagaatggccccacactgaaccatggtagagctattagtttgtagggccccagatggcataaactcgagaagggattgtccacggaaatcaccagcagacttcagcccgaagctgagttcaggaagtccagctgtcactgttgggaaacatctaggagtcttccttggatccataagaagctcttcccctaaaggcagcacagctaactctactctctacctgccacaactcagtcaagaattggcacctgtagccatctgggtaagcctcgatgcttctttcagggatgtgacacaaatggcaactcggagctatttgttactgcttgtctgtcaagattgtagccaggttaatgggtcattttccttctctccagactccaccactgactgatttcagaagaggtagagaactccaaactgtcccagcaggtttgctttagacaacagagcacagcccacatggccctacctgttcagaaagtcatgttagatcaacaaaccacttccattctgagtgcacttttataggttttatgctttagcatgtccgggagatgagttaattaacaatataaacattatgtgagtaaatggaaggtccaaactttaagtttttcttataaaaatattggagctattcatttaagaatttgctcaaaagggaacataacgccaaaaggaaaatgcatgtaggtataggaatttctcagtttagtagggccagggcttgcactatgttccatttattgggcttcgtaacttacttgcttgtttgtttgggggatagtggtgtggggagaggggagtcgtcaagccctataaataagctcattctctatctacccgactctcaattgccctgctaaagagttatttctcctatacctatgcaaagtaggaagagcaccttataggaggcactgtatagggacaggggacatgggatcagccataggaatgttaaatgaaattgcacagaggaaagtttaatatatgtctagagattatacatacacttttttaagcgtaaaaagaagacatctagtaatgacagatattctttttatatacaagcaaaagaaagtataaggaggttctacagtgcaacatccacaatctgtgcattcacatattatgggacttttattttttaaactctcatataaattttttaaaattactccttggaagagatcctggtttttttcttcatttatttttttctttaaaaacatttattttaagagaagagaaaaagagcttcatctaattttgcatcttgattaccaatcagtactagtcacagcaccagcaatactgtatgttttagactgacaaggtcagccaggaaatggcatttttttaaacgcagaaatgtgtttgtttcctctactctaacacgtcctttctcctcctggtgtcctgtcaccccccatgcagcaccactgatgcgagatgatgctctggcctggtccaggaagccctgagccatgggcagattgcccagtggccttgggcggccagagcttgtcacctgtttaaacaagttcaccatgtgtttaaatgacagggtacagtcctggaccagaggtttttctcttcagcaaagctccctggcccttgatcgttggactgttactaatagaaaaagattcaagtcatgaagtataaaatccatcccccatcccagaactttgaaacacaaggagggagagatctttgctatggagcagtcctggagcaaagccccgtggcttccacccccagatatataccccataagtagtgctgagctccagcttagctgagccaagctcagtccttatctggtgttcagccagtgcacaggtataagcagaactacagagctgaatgtagcttccctgggatctcttctcctttctaaagcatttttcacacagttctgtacctcctacccaagttggggctgctttctgcctgctagcccacggctctgtgtactttcttttctggcttcaggtgcagacagaccctcagtaccttcctggacacagacacatattccctggaccaaggcgtggaataactagtagaccaccaagccacaggtggctggtcttgaagaaaagggattatactccttacaggccacccagaaagctatgaattccaatatacaccactgatcgtgcaagttagggttttttttttttaaacgtagcattattttgttatattttggaactaaatgaagtgccaaattaaccag

SEQ ID NO: 15916 - DNA, 8731 bp, Homo sapiens
caacccagaagacaaccctgggtagcctgtgatcagtgtctggagacgtttcttctgtggaagagaagaagtgacacaaacctatacttcatatgctgctttagtcacctgaagatggttggagaggccctgtcgactgttctcccagttgttcagtttctgagacagagaggtacggactaggctgcacctgagtgtgcccctgcctgccagatggacaggtacacccaagcacatctccctgctgcaccctcaccacccacaaaagatcccagctgtcagtggtctcatctcattagtgaggaaagccaagctgtatggaaaagctgcactcaccaaggaccacaatgcccccggcctaaagtactgccattcagaaaagcaggtttttcttcctctctttccttttctctgtctgctactgactttaaggctttttcccccttgaaatgtccagattcctgtggttcatcccaaggaaattttcacacaaagcttggcctttgccctcaatataggtgttttaggatggtgacaaaccatggctgctgctttctgcccagctcgccagtcctccccaaagagttgcgcatcagcacctggggatctggaccctgcgggtgaagggatggggagggacgtccctggagtctcttctgtctttgttccttcttattttggcattcgatatcagcagcctctccccaaagtacttgaagtcagttttagatgctttattttatttttctagtcaaaaacgtgtttcccccagtgtttgaaaactcgtccgaatcttttcagtattttccatgagtattgtggtacttctagacttgtttaagcccagaactcattccttcaaaacagagagccttaatctttatgttgggacacagaccacatatttggacggcagccatgcatccatcgctgaagggctgtggacatgaatgtgtatttcccatggtctccgctgcccacaccaacagtgtggcatctcataagttaactgctaccctaaggtaatctaagattaaaatgtaaacatttatttttgttatgtaagtttataagatgttttatgttcaatgcctaatttctcaaaagtgccagaaaaaaatgtatattagctattttgattttatgtacaatgatttatactctccttttgaaaagataccataaagcacataagctagatcactacaaggagctgttatcttttttctaatcaagtgtttaaaacactgatggtttttaaagactcacctttttaaatggtacttggagctcctgattcaaattacctagaccccctagagaaataaatggaatatacataaataatcattttcagtggtttatggtgggcaatattgcaatatttgaaatggtaaaaatggaaagaagaacaaaatatgatgagaggtggctgtgaattataaacctcataaaagtgtcataattccattaaggtttaattatattttttcagaaaacagtgatgaattctgtagtccagtgcttgccaatgcaaattgcctattggaatcttcttcctatattttacaaacatcagtggctgaaatagctcagagtaagagctcagcctggtttgaatttaatcatctctttagatcttataaggccagcattaggaaacttgttcacttttcattttcaaaggagcctagttgaagtgctattatgagtgtgggctatggaaagacagcttttcctacactgataaagaaaaaaaatgaggaaattatttcatccccttgtgacatctgtgactttttggatttaataatcttgctgtttttcctctttatgacaaagaatataattgggaggatgaagtgtcttaaaaattgtagagaccagctcactggaatgtttttccatccctgtattcatggcttgactttgtgactgctctacactgcatgtctgacattgcagagtgagctatgttgaggtaaactggttggttgtcattattttgcaatcagcctggtctctcccatgaagatgtcgtgtgcataagcacaatcatcactgattagaagatcacagcagaatacccttggattagagagaagttcgtaccttgcatttctctgaattctagtctctcataagcactgctttgctggatgattttcactgctttgtgttaatgactttgagcgatctctcacatgatggggttctttagtacatggtaacagccatgtcatcttacacacctagcattgtgaatgctgtagtgacatcctttataggcaccttacagctcaaaacttttgtttcatttcatgccttacttatcaaaaaggcaggaaagtaggtatgatctctaaagtaaaaaaaaaaaaaaaaaaaaaactttttatagaaagctcataaataatcatgtcattttgcaattttgttaccaaaatttcccccaagagttttcaaatattagttctgcaatgtggctatgaaatatgcactgaaatataccttttaatttgagaaccagtggttagaataagctgtgatataaagtattttcagtgtacttttaaaggaactataaggccctccagcataaacgctaaaagaatagatggtagcacaggccatgagggctgggggagagaagcagagtgaaccttagaaagatggctcagctatttggagcactggatattttactgaagttatttactgaggcaccatcactgttttgactgtacagtatagtttttcataaatttcatcacatttactttgttcagaatctgggcttgaatctttgagttggacaaaagcctatggtttcttttaaaaagtttcatcttgagctaatgctacagtttaaataaaatgtatgaaaggtagttatcaaaaacaatttgtatatttaaaattctattttgacatccattttttacagcgaattatagcaggttatgtgaaatttaaaaataaattttaggaaatttttttatcttgtaagtaagaattataaatctatctcagttaaaagtaggatctttgtttttattcagatattttgaaagtttagaagcattttgtatgctactttggtatttcttaagtatagtcagcaggaaagggtaacctgttttatgcaaaatttttttaatttgtcaaatgtttttagtgtgtctactttctgaaatagtctcaatatcctgtctgtatcctaggcagataactacacaagaacaaaacgctatatagaaaagaaaatatttgaggaaatcttaaattccataagaaagtaattcttgcaagaatgttggctacatatttttttttctgtcctgaataaattacatcattaggtctgttgaagcttttgaagctaccactattctttctgggataaaggctaattactgatttatctgccctcaaaatcccagagttaattctaattgagtactaaattaacagtaagtagttaacacagagaactaaaatttaaccgcattatatcactgtatatatttctcatgatttttgctaattagagcatttacttaaccagtaataaactacacacacacacacacacacacacacgtatacgtgtgtgtgtgtatatacttggctctgacacaactctggtgcttaattaggatatgttctattatgtattttgaatgtttatcctgctagtgtgatgaacttttgttggaaaagcagaattagaaggaacagtttttcaatcagtttcatttggtaattacaggaaaaccttgagttgctctaatttaatttttccaattaatacatttagactttaaattgcatccgtaattctcttggctgaaaaacagtggtattttaagacagttttgttatacatgtgacttacttttgactcagcctgagaggaggaaatgtaaagagataagagatttggcccaaagcagcaagagactagtaaccttgagccaggacgaagccaagacaacgtgactcccaagtagcaggagcagaggtcggtcacctgtggcattctgtttcattcccttttaaaattatgagactttataggcagtgtaaaacatcagcaggcagcgatgtgataggatgtgcgaaaaagctggtctgataccatggctataattacagagctttagttcaattaggattttgtaaatgagcaaatgacctttttttccagtgccccttgtaatagttaatatgagtccatgcaatcttgtgatgccattctcctgaaggtgttgatttctggtacccagccagcttagctttggctgctggaagcacagtaggtactgatgattacttcctggaaatcttgacaggcttattgtactgtgtaatggggaaaagttaaagtataatgtttggtgttaataaatgactgatgtgaaaataggaacatgtgtctttaatatcaaatatggctttatttgcagtgaaatctaaattccttattctacagtagtattttcttgccctgtgttgtatattttcctaaatacatttttcctgacagtggctttaggccagttgaacacacttagactgaaagtgtttaacttaaagagatcagtccagaaaccatgataaattagaatctttatctggaattaccaaattaaaatttaaaatcatggtccagaagagaacaaacattcatggttttttttatcctactgctcatttttaggtctgtgtttacatctagtctctactatttgtgaagtatgtcattatttttttcaagttcttctttgacttaactgaaaaataatattccaaattcttaatgtaacatgaaaagagaaatacaatttttgcttaaaagacattttttaaaaagcgttcaattcagtaatcatttctgttaatacaggaagtttttttggcttgccagttatatactgtgggtattttttaaaatgtgctacccttgggttgtctcatatcaccttgcgtaatcatgtattacaaaggttgataattgtcatttctcagatgtctgtatgttacattggcagcagtaaaatgttttaatgttgttaccttttaaataattgtgttgtattaacatgcctcatattttctggggaaacttgaaatatatctaaacaaaaaaggtctgttataaataggaattggcatttcattgttaatgttttttcctcataaaaatagttacaccaaaagtgacatattgtctattacatgggcccaatcagtattaaagtactccccttactcaaaaatattaaaaaataattcatgacacttagtagcattttcattgattgtttcaaaagatcttcataatggtcaaattgtccaattcacaaaagagtgagaaagttgttttcagtactgggaatttttaaaccttagttttaagaccaaaaatatctcttattagcttgaacattttgtgattacttttccctccccggatctagtccttttaaggagtaagtctaaagaatgaggccatgaagtcactatttcctcccacctcagtttgtctcctggtacttagctggcctatcgctttgtgtggcaatacccctgggtcgcttccccactcagccttctgtatctgctgttcacaggacatgccattatgtctttccagtacggatcacagtgctgccatatcacagaccctgccagccggcacagaaccatgcctcgtcacagctctgcccaactcacaggctgccaagatgaggccacaggtccacctagggcggcagatgctggtgctatttgtcacgacttttgccaaaacatgtacactgttgctcacatctttcgtaagaatggttgacactaaggggccatggaaaagcacttttaaaaaattatgtggtggaatcaaactcacagaggcagaaatgttagtgccgtgctctaaccaagtaagcttagtgttccccacagtgatctgtatctggcctgagtctcctcaagcagcaacccccactgtccagcatgtggaaggtagatccttatgacaacaccagacccatagttaccaggaaagaaaaaggaagctgagtgttgtgaaggggaagaaatcctttttataagaagtaatcatttttaggccgggtgcagtggctcatgcctgtaatcccagcactttgggaggctgagacaggtggatcacttgaggtcaggagtttgagacctgcctggccaacatgatgaaaccctgtctctactaaaaatgcaaaaaaaattagccaggcatggtggcatgtgcctgtagtcccaactactcaggaggctgaggcaggagaatcacttgaacctgggaggcagaggttgcaatgagctgagatcgcaacactgcactccagcctgggcgacagagcaagactccatctcaaaaacaaaaacaaaaaaaaaacctttttaaagtaaattgagtgtaaaatgttttcaccatgaagccattgcaccctctcccccaggaaacagtgcctaaggatgatgtcaagttacagccagtttgctctgatcccccaggacctaagaaaactgtgagtgcttcagcatgcaaaggtagagctaccagataaggagaataacttggccatttatagcaaactgcctgactttggagtgagaaaccaagcaccttctaggtcctaggataggtgaattggaggtgcagctgctgaagttcccattttctacatacttcaggagccagggtgtttcatttggttttgtaaaactttgctgtaagtcatcacagttaattctttgaatggacattttagagtgtaactttttttcaaaattagcagaacagatatctctgctcattctctttatacatttagttttttaaagttcccctagtatacctgttaggcactctaaataggacacagttaaagctaaaagaaggaccagttgctccctagagcctacagttcagaactatcttgttgtcatgtcctggtttggtttggtttgtttttaactcaacaagttggaaaccatgagtttaaagcaaactatttccttttcttaagcttaaagagaattttttttttaatctttagctcctcatttaggtagtgaaggcttccctgaaagacagcagtgcccttctctggaagaagaggctgggaccaaaagcctgagtctatgggttgaggattttgagcattcctttgacaagcttctatgtatttttaatataagactcataaatgaacctgatgtggtgttcatgacccatcccttaagcatgcttgctttttttaactttactttttgagtatagtacttgtcttgtttttcctggagccatgctaggatttaattcctatgtgccactacccgcccatgtcctggaagatggccatgcctgcagcaatgctcatgtcttgaggagaagcaatgtgaaaagcatcaggaaagctgaaccttacgttcaagtcagcaaacatttgtgagcattctagtatgcttgcgaccttgacactttttaaaaattatctttttatttgcttcgagtatcaaccgtatagttgactctagtggggcgaagggagcagagatgagagcaaaattcagacttgctgcccctgtgtgtctcagttctcatgtctctctgagaaatgtgttggcccaattccctatctgccactctgagtctcttgagtaaatgtgtgtaaatgagaaaaattatctcaaagatttaacttattatttagatattttcttctttttaaactcaggaataaacctggtttgtagataatataatatggctactagagctataattgagtaggtgactagaagcattttttcaaatatatttcttgtaaagacatctactttgttttaactaggaaaagaaactcctcatattaaaataaacatttccataagcactttctagaagagtgtagcatccatctaccatccatcccagaatgtttgtatcttgctcatagtatttcaaaaatttttatgggtgaaaaaaatgcacttttttatttattggaaaagtgtagagttattgaattaaattctcaagtgggacaatttagtgtaaagggaaacatgggttttggagacaagagcacagggctgtggtccctgttccagcattgactttactatgtgacctcgagcaaatgatttaacttctctgtgcctcagtttctccatatacaaaatggggataatgatactaaccattgcctacctcatagagatgttatggggacaaacgaaataatagagataagcacgaatgctttcaactcttcggaagaaaggtgctatataaattgaagttgtgtttttaatgatccaattattaattatgtttagggtttaaataacaatactgttagtcatgttaagaataagttttgttttgatgcatatttccacttctcttctgtggccagatcttgatcattcaaccagtaatggtacctgaggaactgaaatgggtatttgttttcgtatgtttctgccagtagtatttcaattgaatatccagaaaagactggagtttaacttgtaatatcttatagtttacatgtaataaaacttattcaagctatatataaaagtatgattacatgtaaatagcaggtatgttgtaattaaaggcacttatcaaattgtctttgttcttttttaattgtaataaaagtcagttttacat

SEQ ID NO: 15917 - DNA, 3067 bp, Homo sapiens
aaaatcatttcttcattgaagtggctttttatcatttaatgatggaaatcaattgcttccattgacaaaactgaatacactgcaaatatttgtttttgcttttgtcttaatatatcagatatgcaaaggcctaaactgagaattaatctaaaagtcagtgttatttaaacattttcaatgtgcatgcatgtcattattacatcaaagcatatatattggccagacacaaacagttgatgatgtcattcaattaactacaaaattctaatctatgttgaactttgtatacttgaaatgataataaaaaggatataatttcttagtaaaatgaaatcaaagtattgatcagggtagcaaactcaaatgctgacaggggccagaggagatatggggaaggagcatcagaaatgaggcaagctaggagaatgggctattataatgtaaagaattgtagtctcagttaaaaggggtagcctctactccagccaacattttaaaattaatggataatttatagacagttaaatttatagacagttaagtaaaaatggataatttatagacagataatttatagacaggtaaatgtgagttaaatataactcacatcccactcaagacacaaaacattttcttaatcctagtacatttttttctgtcccttcccaatcagtgtccttttctgttccacccctaccaaaagcaagtagtggtttggtttctatcatatagattaattttacctgctcatatgaagggaattgtacatcatgcattcttttctgtttgccttttttaaattcagcatcatgtttttgtgatacatccacattgttgcatgcagctgtagtttgtttctttttattaccaagtactatttcattgtatgaatatatcacagtttatccattctactattaagacaattgagctatttctaattttcggctgctatgaataaagctgctacaaatatttttgtacaagactttttgtaaacataggagtccctttattttaaataaataactagtcatatcattaggtccagtaattgttgacaggcaggaacgggggaccattgcattgtgcccaagtaataataaaactatttcagatgtattatatgattgagcaaatgagaaaacatgttgatgttgatgggagtcaggatgttcactatggaaaaacaaatatacaaatatgaaatgagggaaggcaagaaagaaccatgtggaaatggaatagaattggtataaattcataatttctaaaccatgtatatgtacgtttatatgtattataattgcatacacatgcctccatgcatatatgtgtgtgataatacacatgcatttatgtgcgtgtgtgtatacacatgcatatatttactaatcctatctgccaaaatggcttagacacaaaaacacctcagcagaaatgaatatacctagcactcagatcttcgtgtctaatatagtttgccactaaaaggaaccaaggctacttggaaaaatggatgattccaaagcaagggcaaggtaggaacaagatgagcttgaaatatcttgttatgccagaaagtaatgttaaaaaaaaaaatagaggtatattgccaaaacatagagccagcttgaaggggctcccactggccaaacttgagccaatctgagagcaaaataattgagaaaaataaataacaagataattgagaaaaaaataaaataaattcccaattccattgggaaaaaatagaaatccatgaatccatactgatataatgatagataatcgatagataggtagatgactgacagatgatagatagatatatagatagatagatagatagatagatagatagatagatagatagagaaatgagaaggtttctcttttgcaatagaacgtcatggaccagtgttaaatgtgagtggaaggagttctggaattggaaaaccatcatttttcaaccatcacagtaaatatggctcaggcaagaattatcaatcaatgctaaagctagggggaaatttcgcttaggagcaggatattagggtattagtctgggcttaaagtatctcctcacagattgttgttagtttctggggaaagaatagtaaccatgcaatggaaaaaaatggacaacctcttgactaggttatcaaaattaacctcaccaataaagggtggatgttcaacatgtgccttcaaatgtgacccactgagaaggaaacaacatcactgtaacaacaacaaccagaaacgacagggggttttgactgaattcttcaaaaatgtcaatgtcatagaagacaaagaaaggttgtggaaatgtttcagattaaatgatagtaaaaacacctgacaactaaacatagtaagtaatactagactggattctgtaccagaggtaacataagtgctccaaaggacaatgttaggtcaactggcaaattggaatatagacagtcaatcagataagaagtatactttgattaagtaaaaaaaatccctattcttggaaaatacacaataaagtattttgaggtaaagggccataatgtatgcaatctactctcaaaaaattcagaaacatatatttgtgtgcatttgcatgtgcaacagtacacacaaacatacataaagagagcaattgataaggcaaataaggtaacatttaacaataatctgatacacataaatagagaaagagcaattgataaagtaaatgaggtaaaatttaacaataatctgagcaaaaggtatatgtgttttctttgagacagtctgattcttgcaacttattctgtaagttggaacttatttccaaacatgattgaaaaaaaaccccgcacttggcaacttcttctctttttcagcctagaaatgtctgtgttaagtggttttttatttattgttgttgtttgttgttattgttgttttgttgccaggctccaactcacaaaatacgagtttaaaaactgcgttgttatttttagagatttgtgataatacaacttgttataaaatttattcctcaataaatataatttctctactatgc

SEQ ID NO: 15918 - DNA, 165 bp, Homo sapiens
gccaagggacgttgacctggactgaagttcgcattgaactctacaacattctgtgggatatattgttcaaaaagatattgttgttttccatgatttagcaagcaactaattttctcccaagctgattttattcaatatggttacgttggttaaataaactttttt

SEQ ID NO: 15919 - DNA, 1390 bp, Homo sapiens
ttaaggcagcctcatagtcaatcccagttgcttttccccagatttggtgactcatcaatggatatgtgttttggatgtatgatatgcttggtttaaattctctttgtccaggtcaaaaatttggaacttgtttcttattttactatgtctaggtttgcaagaattgacataatgtttgtttcactgatttaaaaaattttgcatgtaagaatgtactttaggaaacatacccaggaagtacagttgataaatataacatcaactgaaatagtcaattagcaattttgtgtttctaaatatctatggtcccctgaaattttgacttagtatataggtgcagagacacccacttagaaagttaactgtttggaaaaacatttctctttagtttcaaaaaccatatataattaaatttgtaaggatatactgagtaccctaggccaacttttttttctttgcagagaaccttttttgttttattcttcagtgttcatatagcacctggcccattacatatctaggcaactaaaaacaaacattgtaagaatgaatatttttaatgtagtaattcctagttacaatagatacataaagtaatgaactcagcattctgtacttttgcttcaggtttgaagtaaaaattatctagttaaattttttttatttcacgttaccatgccatttcacattaccataccatcagatagcatggcttattgtgggcatttctgcagtgaatacattttccaaaacagttaaattgtctgtttggatttgctttaaagtcttgtgtaagagagaagaaactatttctataataaaaagcactctcatcagatatctgacataattagatacaatataacattttactaagttcagtattcatgttttaaaggtgtttatactgatttgattgtgctggcaaatatactgtattgttaatattgaactgtttatttttctcttagtcttcttatttaattaacttcattgccgctggattctgttcagcctttaaaaatatttcttagtggtcattgctctgcagaactcaaaaagaaaattgtacttgttcatagacatttttaaagggttaatttattgttcagccttatcccttggcacgtaaacagactactagacttattgtaggttcgtttgagctttgtgttgtaaaattaaaaatgcttctgtaaagttttcaaggtagggagtgattttattattgtgtatatctaatatattaagtatgtgtgatactaaggtttgactgctataattatttgtactgttgatcacatgtacttaaaacatctgatactgtattctaagacaggttgtttttgcaattaaatttattttaataagacgatcatgaataaaactt

SEQ ID NO: 15920 - DNA, 972 bp, Homo sapiens
tcattcaaagattcaagtcagaaatcacagggaaaattctattacatgtttaagtccatttattttactacaaatactatttttgtaatttttaaaagttgctttttaacttatttccccttatgtcacattttaaattatgagttttctattagagttttttggttttaagtttaattgtgtacggatcctcaattattagcaaattcttatatttaattagctttcattagtttatgctgtagtgacaacaacaaagatgtatttcctggtgggggatgtcagctgttgattggctgtgacactgctttgtgtcatcttcttaccatgatcaaaggcaaaggaagggatctcttttgggacattgtgattgttttagcagagagagaaagagatgaaatacacttcggttttctcttaaaagatgcatgtatcatacgtgctttaagcaagtcatgtggccaagcctagcatcatggagccagaaagtatagccttgctgtctgtctacatcatgatgtataaattgatatatctacatgaattatagaaacttagaagtgatctttattcagtcttataatttttacatgaagaatcttaggcctaggaggagaaaatgattttctttctattacctaactagattggggcatatttctgataaagacccacctctagtgagattcatcttttttgtttgtgtgactatattccatagagaagaaagatgggatagctcaacttcattatataccaaagcaaaacacatgccaaatgatgactacattttaccaacatatttagacgagtattcttgactagtgtttactatctatacccccaaaactactactatatagacagaatggaaagtatttctatttgtcctttttttgttttctgttctaattgtcagggacatatgtagtggctataggtttacttaaaaggaataaatttggaatgctc

SEQ ID NO: 15921 - DNA, 1914 bp, Homo sapiens
tgtatcacaagcagttccctccatttagactattcaaaaatttagaagagtggcaaatactattttaaaagaagaaccaagaactgtaaaacatatagaaaagagcaagaatgcacatgtataaagtttacataaagaagtttttttaagttattgagataggaaatatattcactgctgcttttaattgtattttatccaattacatttaatacactaaaaaaaatcttgttggaattctgttatcaaggcccacattcttaaatactgtgcataaattattatggtgttttgcctatatattgctccaaactactgtgtatatatgtatgtgtgttaaatcaccaattatattaatcaaatggaaattaattgcatgttactatctgggtgatatattcttctttatatctctgacatgacatattttcattaatagtttaaatcagtgaccatcataataaagataaaatttagttgagtttttaatgtttacatgtttacatctctaaataaaatttgcttatttgaaatgttaatgctctttagaaaaatgactttctagtaccaaaggaaaactacttgaaagagctgtaatcatatagctaaagtgataagatagccttgattttaaaagctgattcattaatatcaaaatactttaataagtgtcacagttattaatatgttacatttgtttagtttccacgtaatctttatctctacctagatttagtgagtttgcctctttcagaatactacctccttttgttaaggcatattctttcgaaaatatagattctaaataaataggggcttatacaaaaaagaaaataaaaagccatatatactgcaaagttcctaactggcttgactcctgacattgcatttttatttctatttgtgtgaagatgttgttatactgtattatggctgattttctttttaatatatttagccaagtgatgcactttatgataattaaactcttttgtgccaagtttaattggtggatttttttagtaagtagagttaggagaaagaattatgtagtgcctttactatttcactttctacaaaagtctcctagggtctttgagtcagctttatgaaaaaatgtttgtttatttcagctttgtgtacagtcattaaaagtgccttgtttcatttttataggatgaagttatttattttctattttcactgttttgcatattgctgttaataagcattgtaatcatgctggcattttgcaatcccagtcggtatgctttctaaaaactgagggaaacttactggggaaatagaataacaatctccatttttttctttactatctaaaagtttatcggtatcttgatgtatatatatattaaggtgtggctgtttaaaattctaatgacatatatcaacacattcaatggctgttgttaacctttgaagtaaaaaggagatcactttttaccaaataaccaaaaatttttagtctgtcaaagtgcacaggtatgttctcagaacatttttcacaatgtgtatcagaaatatgtttgctatccttagagacagaaatgaatataataaattgatctgcttatttattaaaattattattctagacttacaaaaggcttaaaaagaacaatcatttaatcagtaccattctgtatcttatataacagatctttgccaaattctagatattatagtgttgcctgtctgttctaaagcgaaccagccactttttcaatctggctttttggaagattgtatttaaagttcttcaaggatgaagaaaaaaatctgttaattaggtaaaccactattatttatatttataatttacttttttttacttttataatgcattttactcccagtattatgttcatttaataaattattttttcactacaa

SEQ ID NO: 15922 - DNA, 332 bp, Homo sapiens
tgattctgagaagaaacttgtccttcctcaagaacacagccctgcttctgacataatccagtaaaataataatttttaagaaataaatttatttcaatattagcaagacagcatgccttcaaatcaatctgtaaaactaagaaacttaaattttagttcttactgcttaattcaaataataattagtaagctagcaaatagtaatctgtaagcataagcttatgcttaaattcaagtttagtttgaggaattctttaaaattacaactaagtgatttgtatgtctatttttttcagtttatttgaaccaataaaataattttatctctttct

SEQ ID NO: 15923 - DNA, 5004 bp, Homo sapiens
ccccaggcctcttccaaaaccgccatcagtcccgagagctcaccctgcccacctcgccgcaaagcgaaagaaactggagcagccggcggcaggagagggcaaaaagccaagagtaaccccaaccccccactcccggtcccccggaatccctgccgcggcccctcgggcctgtccacatccctctgcccctcccagacctctgtccttccaccaatcgcctcccgcagccccgagccgccactcccagtcccccgagtccctgccgcgcgccctcgcgcctgttcacatccctctgcccatccgagacctctgtctttacaccactagccaccccacgtgggacttccatggcttctgagtacaaggccagccccccggcccaccagctttcggaatgcctgcttacctctttttctgtagaggcaccacagggaggtgggtgaagcacttcggctctggagttacagatctgggttcaaggccaaattccaccacttactaggtttgtaatattggacagataacgtctttgcgcttctaccttttggtctttaaagtgtgatcaaaagagacttagactcccacatagtaataataataataatggcaaacttaacaccccactgtcaacattagacacaccaacgagacagaaagttaaaaaaggatatccgggaattgaactcagctctgcaccaagcggacctaggagacatgtacagaacgctccaccccaaatcaacagaatatacattcttctcagcaccacatcacacttatttccacattgaccacatagttggaagtaaagcactcctcagtaaaagtaaaataacagaaattattacaaacggtctctcagaccacattgcaatcaaactagacctcaggattgagaaactcactcaaaaccgctcaactgcatggaaaccgtacaagctgctcctgaatgagtacagggtacataacgaaatgaaggcagaaataaagatattctctgaaagcaatgagaacaaagacacaacataccagaatctctgggacacatttaaagcagtgtgtagagggaaatttatagcactaaatgcccacaagggaaagcaggaaagatcaaaaatgcataccctaacatcaccattaaaagaatgagagaagcaagggcaaacacattcaaaagctagcagaaggcaagaaataactaagatctgagcaggactgaaggagatagagacacaaaaaacgtgggatggttttttagtatgtggaaaaattctttgatggtttttccttgaaaaagtgaaacctaaatccactccgtttggatgtgggacgatttgcggttgttgcttcctaaacataaactacgtttaggctgatatttcagacaatgaaacctttgagtgcccgtagcgggaagatctcggttgctgagtgcagggaaggaggatgtaattccatcatatactctctctgtgcctaccgcatttggaaccatgcgagtgatacctatttataaaataaaataaaccaagcacaagtacgaacttagcaacactatattgagttaatagaacggtatcttgtatttcttctgtccaggtatacttataaatgcctgcagggatttcaccacctcagggtggagagactgaatgcttgtgagggaattaggatggtggaatattggtgttaccagggaagggggcgggatgtttgaaaatgctatgtttactcgttcttgggttccaataaaggagaaacagggcacaggagtcggaaggactagtggcaatagtgatgaaaggacctccttatcatgctggcaatgttaattacccaggtgtaggaagccatacactgaggcggaagatcgcaagtcagagtggccggcaggcacaacctcctggcacaccagaggcaggtcttcaatacccactggtttccccaacaggctgcgtaagggaccctgagccacagtgagttggtcaaatgctcctgacagtgtggagaaaccaacagacaaaacgtgggtgcaaaagtgatgagaccccacactttacactcgtggtgacaatgaagctattaagtaacagcttctcaacctatgctgtttcctgttggatgcacataatccatttgcactgcagacaattttaggatgtggtttacagtaaggtggatggtaccttatggcaaaaatctctcagaaatttatgtgtggttttaaagtcattccagtcctagcacgttgtgcttttcagagacgccatagctgtttttccctttgtaatatcaaagcagtaatatgttctctggaggcctgttgggtgaatttaatggaatcaagttaagtaggtgccagaaccattgctgttttccctccatagccctgccacccactgtaaaaaggttgatgagattacttaatgatttccaattaagttgtatttccaaatatcatgatttccattttaatgtagttggtatggagctctgtgagtgtgtgcttcttttattatggatcacgttcagcttctttttatttgcctcctagtcataatagtaaaactctactcctctactccgaggagtccctaccacccatctcatcactttccagcccagcactcttcatgctcattcatttaaagcattcaacattgtgtaaatgaatcttggaaggccaaagctactgaatttagcgaatttgtggaggcattgccacaaatcagccaggtgaagtttcacacaatcgaagactgcacaactcctagaaggcagcactatgctgcaaacccagacggccactcttctcacccctcgtccgtttgctgttctggataatgaggttcaaaagtcacctaggcaactgccaaaatagctgaaatggagaaagggcttcaggctggtgactagcagaggtccacctgacccccgtaagctgctgaacaagtagggctgccagaaatgtcccactagggaatttggtagagacgaagacatgctcaccggacaagggttcctcccaggatacgcccgagcggaagaagcgggctctgagccacgccctttcaccctcctctaccccgccctgggctggtgaaggtgcgcgccaggatgtggactactgagccctgaagaaataagtccttccactttgaccccatggaggattgcctgtgaggaacttaaacgagtctaccagtgtctagacacgggggcaggtctgtccggcacagcagctccctcaaggaggagaagagtgaggagaaaggaaactcaagtctcaccattctgtcctgggagagaagaggaggatctcatctctcatctgtccaaacaaggcaaggagactttctctcatctttccaagcaaggcaaggagactttttatcattaggaaacaaaaagaatttagaaggaatgaaagcagcccgtaaggtgaattcctaaggactgcccattgaaactgacaaaattgcccttgtttgatgagaggaatgagcagagcattgatgtggtgaacaaggatctagtgagactttcccagcatgtttctaccaaagctttatctaagcttctcagaacactctcctaataagcagatgtttggcctttcagaaagtcaacaagcaaaatgccttgagtgtcccaaaacactgatgccatgatgtgggctcctgactggcctccttttcctttgactggaccgctgccacctcttggtagccatcgctttcatgatgctttgccttggagatcatattggtgaagccatgttccaactgccgcttacaatttgtcagagggatgcgtcaggatcgtgatccctcctgtttaaaatttccactgatagctctcgtcgtaaatgcagctgatctgggcacagtggttttcacagccactgcaggattcatcttccacatcttctcacctcttcttgaaacaagctatacattcgtaaagagttcatttctttggggtagtgtccttacaagcttttcttaaaacgtcaatgatgtcttcaatcttccacccaagcttcaccataaatttgatgtttcctcttgctgcaattttcgtggaattcatgttgctctgacgggagtccttttcagtggatgtctcatccttcttagtgcctcaaactagatctagttcagaaaggttatcagaagttaggacaagtttattttagtgcaaaccagtggaaatccatgcatagtttcttcaccatgtgcattttctatgaacctttggaagaccacctgtgttgaacattgcccaagtcctgggagagaagtgggtgcggtccgcttcctgtcctcaatttgcccgcagcggcggagtgcacagagcagggaaaggcagccccagagggatcccgccctccagcatgcagcagactgctggcccagtcctggctccaaggggtgctgtgtgggcccaagcaagttgaccaacctccctgaaccttaatttaatcctaggtagcccaattccagtagccattataggactgccctgccgggacagttacttaactcaggaaaagcaacctagctccaagtttagcaaccgggagttccagttgattccattagcgcaccccctgaggcattcccaagctggagtctggtggaagatgaggctcagtgtgattggactgaagcaccaacctatcaaggagaagtcccacccagtctgccctgtgcctatataaaggcgacaagtggcggccgcagcactcattgaagccgccagttgggagaggagcagagccaggccggtgctcccgaaggcagcaagatgttgcgagccacagctccctgctggttcccccctggatacccagaagctaagaaggtggccgaggaggcggccctggaggcaagccgccatttgggaggggagcagagccaggccggtgctcccgaaggcagcaagatgttgcgagccacagctccctgctggttccgccctggatacccagaagctaagaag

SEQ ID NO: 15924 - DNA, 354 bp, Homo sapiens
atgtcggaagtgcaaactcttaaaaaattggccttctaaaaaacatatatcagattccaaatcaaggttaaacatatgatagaacattcatggtgaaattcctatggtaaatatttttttctcaaatgaaataagtaatgtatacaaaagtgcctaagacagtacctggcttcagagtcactaagaaattgctaaaagctctgcttcgcatggtaaaaaacttaagtcctggtttgcgtagcttgatagagtgattatacaacttccattctctcactttttttttctgtatcccaccccttttctactgaatttgtggggatcctataataaaagtgaatgactaaaaatttt

SEQ ID NO: 15925 - DNA, 1958 bp, Homo sapiens
gaacttttcagagaagatttatgaaatagctaataaacattgccttttcttttaattctaaacttaatatatgaactataactgttctacggctttttaaatgttgtgaccatttaaccgtgtaaatataaaatattctaggcttcttcacaaataatagggtaaaataaataatcgccataagagtggtagaaataaatctccatggctcaggcaaagagattattttgcatcctggataccagcaatgcaaaatggtatgagatttctaaggattgatcacattgggatgggagatcaagcaaagaaatatttgtagaggaggggaaatggatctataggggatatacagggggatggattttcaaattggattgattctaagttgaaatcttgaagagaaggtgtggtgacagtggttaggatgttgtgggttcctgacataaagtagttaaatgatatatcttggagctaacctgtgtaagtaaagaactaagtaaggagatgactaaaaatggagtagtttccttttttatttttttgagacagagtctcactttgtttcccaggctggtgtgcagtggcacaatctcggcccactgcagcctccgcctcccgggttcaagtgattctcctgccttagcctcctgagtggctgggattacagggttgtaccaccacactcggctaacttttgtatttttggtagagatggggttttgccatgttggctaggctggtctcaaactcctggcctcaagtgatctgcccgccttggcctcccaaattgctgggattacaggcgtgagccaccgcacctggccagtttactttaaatgtggtgtagtctcatggtaaactgaatttgtcatcagatgcaaagttctattccctaatggaatggaaggaacacaaaacttaagagtgaaatggaatactaagatgtttttaaataggcaggactatgctactcacttgaggctggagtgccaccactgcaaaatctttttaagttttgtaaaaaggagcatcttgaatccacttagataaagacagactgtgtgtgtaggtggatttttcccaaaggatttgggaattgtaatgttacaatgaactgtatggatatgtttgtcatgtacattttcaaacaaaaaggaaaactgaaagtagtgatctttgtatacccatctcttagattcagtgattttgctatataggttgtgtatcccttatctgaaatacttgggactagtagaagcatcttggatttgggatgtttttccaaattttggaatacctgcatacacacaataagatatcttggagatgggacccaagtttaaacacaaattcacttgtttcatatataccttatgcacatagcttgaaggtaactttatataacattatttttaataattttgtgcattgagaccaagtttgcataccttgaaccatcagaaagcaaaggtgtcattatctcagccactcatgtgggtaatttgtggttggttgatgtcaccatcattcctgactgaatgtatatgctaccaataagcagttattttcttatacttattcatgcataagtacttaacagtaaaaaatatgacataactcgcacaggaacaaggatggcaaaaaaaaaaatatgacacaccactgatacagtgaaaaaataatgtggtcagggtagctaggcaacagtagcatcaccagaaacctgtatcagctgttaaacggcaacaacaatggcaggctttcagtttcccacttaatgatgctgtattttaaaaggttattgtatactgtaattttatttttgtaggtgaagagaaacagaagcagctgaagggccaggaagtgggtctttctagggatgtggcattctgctggatggctttttaaaatgggttttttcctttagggagaccgaataaactgtgttgtgcacctgc

SEQ ID NO: 15926 - DNA, 1870 bp, Homo sapiens
atgtttgattatctttagatgtgatatagctagttcccaaagtgattgtacctaggattgtaacttaaattaacgaggggaaacgacatgctgggacccttgagaaacgaaaggcaaatccctagcttagtttctaggacttatctgagagtgtgatttcatgcagtggtaataagaagattattaaaagccatccctattctccgttttcattaactttatgcaattgctatatcttctaattgtatgtagtaagtttccttttcctttggttctttcctgatgatgtctcttccttccagttttattagcttgctcttggctgtgatgtgattcactaaccttttctcttaatttttattgtgtttaatttcttctttggcactctaaagcctggctaattgttctaggtttatgaatttcacctcttacatgtaaagggtataagattttaatgtaataggtcaaaaatcagattattttcattcaaatgaggatgatgagtcactgtaatatcaaaaaatccccagcagctgggactgaagggaagcagagatcatgaagctttctgaatgagaagtctgatttttggaacagtcccctgaagaccaatgttggtcggcagaattagcaaactggcaaaatcacattgcaggaacatattggaaaaattgtaccctttactaaagaaataaacttcaatattttctcttctaaccaacttaaaagacaccaatctacctaactcatctggctcaagggacttggactggaggatacaggctaaagtgacacttatcagaatcttcctcaagcacttgctggaaaagatatcagattggaacttcttgtttaaaattaagctttagtaaaacaaagtgatgaggttaggaaggcagactctacacatgtcagattgacatatccccacaatttccggaacctacatgtatagctgtttacaaaatctccaagttaattaagggcactttaggaagttgtcctcatgaattagctagcattagcataattaccgacgttgcatgctgtgaggaggctacaaaggccaggctggtgtcggaagtaataatacatatagaattccattctaataaatgccattagtgtataacatcaagttctgtgtaatgaggctatttccaagtctccaaagatggtcactgtaacagcactttgctgagagggttttaacaaatcatattagccaaaaagcctacaacatagatgcatttagcaaaccatgtacaaatcaatcactataataaactgcatcatttgatagagtcaccgtttttgcatgtagtgttagagtatcacaaaatataacaagttttactaaaggatggttggttttttcaggatttaagggaatatggacaaattgttaaatagtatttatttgataaatgggagtttgtatgcagaaagagtgaattgcgtataaaaagggtgatttaaaaacccagaaacaaaaggtagaatagggctgaagcatctgataataggaaaagaaaaggacaaaagtcctcaacttgtgagcaatatgctttccctttacaccctgtaatttattcaaatgatattaaaatacaagaccattgcaatttatgcttttcgcctggcagttattttcccccccaagctatcctgtttcagataatatcaatttatttccaatccatcagactaaaatctaagaaaattcaagaactcttttattgttgatttggtgccaccaaattctttttctttttaaatctttctaattatcctttctttttcaatcccattgctaacacccagaacatattttctgttcaatgcaaataaacattcactttttacctat

SEQ ID NO: 15927 - DNA, 2030 bp, Homo sapiens
ttcttcaggatgcagcccggaggaacgtggatttgacttaaagaagtaaagagcatcgtattaccgtttctatgagcgcattttaagagatgttcggtgtttgtagatcccatccatccggctgctaggggtaaggtgctgttttatgtgaagatagttctgtaaagttgtttcagttaaactgggctgagagagcttgaaagtccttttcataaaagataactatttccttttcttgttgaataccttagaatagttatccccccctttttttttttttttaacaaaaaaacacttttctaaggactgaagattggcaaaaactaaaataaattaaaactgcttacaccagaagccttttagagaagcatgagactgtttgactagtcctacctgggttccggaaatacatgcatcatctgtacttgaagaggccagtgggagaggagaggagggggaggtcatttatctgagtctctccagaagtttttaaggctacattttggaatcattaaacttggccttctcaaactcaatagcagatctctgagattctccttttattattttccataggcaatgggaggaaaggtggatctttttaaataatagaagttttaaacagtccttaacgtgcttttgttgaggcatcttccagaatgtaaggtacagcagctccggtttctattattgtgacttgaatgtcaggattcaagggctcagtgtcaaagataattggctttgactttttgtaatctaggagcagcagtttgtgagatgtttattcaaagtgttagcctgtttttctaccaacaataagctagaaaagacaaaaaaaacaaaaaacaaaaaaacgtgtaataaagttagtggctacttcttaatagccaaagcctggaaatgatctcactttacaatatgctaaaattgataaataatttgtgctgtagtcatacaattggataaagcataatataaaataaggcacaattgctatatgaaactgtggattaatctcaacatgttgattgtaaatgtaggtagaaatgagtacaaactgattcagttctaaagttccaaagcactaaaaacttatctatggtgattacagtttgaatagtaggtatctctgtggaaggaagaaaggatattgtttgtttttttcccttttatttttaggatattgtttggaaagtaacacggggaaactttagaaatgctgttttctttttcttgatccttgatacatacatattttgtatgtctatacacttcacactttatataatacctcaaaaataaaaatatgaaaacagtacactgttgtaggttggtcaggaaagggaatgattgtggcttggacctgactatgagaagtagaaataatcagaaaaatcagaaatgattgcattggaagatcattcgaaggtagtattagtaagatttgctgatgagagtaatctagaaagtgaaagacagcataaagattgcagcttttttgttaactttaggactggtggatggttggtgtcatttactaaaatggggaggatttgaggtgaaaaaattttaggtgaagagaataatgctgagttttaggcaactattaaaatgtccattctgtagattagaggtgatgtcaggacataaatgaggttaatgtaatattacatattgatagaggaataggtcaatagagaagatacaaaagagtggttaggtgcatagatttttgaaatcagttaaattagtttttgatacttgatgtgtgacaggggaaactgtgtaagctgtacttgttatttctttgtaaaatgtcttagataataaaactaaatcataaagtagatattggtttaaaggatgtatacattgtcccttttacattgtaagcattcaataagaactagctgcggatgtaattttttttaaaaaagtccaaaagcagctatgggcagttgacaaaagaaaatgtaatgactacgtaacttgcgaatctgtttaccctcacttgcaaataaaataagtgc

SEQ ID NO: 15928 - DNA, 4229 bp, Homo sapiens
tgtagggttttttcttctttctttcttttgcaggagtttgtggtaacttgagattcaagacaagagctgttatgctgtttcctagctaggagcaggcttgtggcagcctgattcggggctgacctttcaaacccagagggttgctggtcctgcacatgagtggaaatacactcatggggaagcttccatgatgcacagtatctgctgttcttcagtcctttgtctttctttgtcattcagttctaggcctttcctctgcacgctcaatgcccagtaaaatttcaggattaactaaagaagaggagaaaaagaagaaaagattcttcttaaaagtttctaatgttattttccttctgaagtctgagcccatttctggggggagaaaaaaaaagcaaatcagaaaacccacggtttttctttttttctttttttctttttttctttttttgctttaaaacaaagggaaaaaagagtttaaacaaaaaacccacaattgaacttccaggaaagtgtgaagacccaaaacagctttgtctccaaagaagatagctctctgactgctttggatagtctcctacgcaccattttgtcaggtgggagatttggaatacacatgcaggacgttagactgttgggacagccattttccaacaaccaaggggccaaaatatctgcaatatagtaacagccttaataatacatccatttttcgttttatacagctgttctcagctatgtcctcagtgtttcatcgcatttatattcatagctattttcaaacacgaccttttaattgtttttgaagtatttctaaaccccttctttccaccttactcctccatcattgtgataatcttcccaagttgtattaggccattgccccaggccttccatgggtctgtcaggaatattcgttacaaagcagagcaagaagcagtatgtctctgaagtggattacagtggcagttattttacaaggatttgtgacactagtaacatacccgtgtaaccctttgagaactatcagaccagctttcagagtcttaggattgtcggtcttgcgatctgataaattatagaactgggcaatggtaaaaacagtcacaagttcaagaagttcaggtttttaaaacagatatcctataatgtcatataatttttaaatgatttacaagactacataaatgtgtttataacaaacagaaatgatgttacttgccaaaatttttctggcaaataaaaaaggtattttattaagattctcataaatctgaaattttatttgaaaaactgataatagcctaagtcttcttttcttttttttaggcatactgaatttctgttttaaaatccattgcatgaaaattcaatttgccttggtatatgcagttagcattgccattttaaaaatgaattaaaacggtgactctgaagttgcatgaatatcctccagtgcattacctattgcatgtccaccatagttctcaaagggttagtgtggcttctggcatttagccgtccatttgatcactgacagagccaagagaccaccaaagcatttcattgttgagtgtaatttgtcctaacagcagtattgtcattttcatgtgacctgcagagcaggtttgtatcaatatttttttcctagagaaaagtcagcaactgacagacctctttattgatttttaggagctgcttcttgcagtgaaaggctttacagccactgggctgtgaacttattagagatggtcagaatgaatgcaccccatgagtcagacattggctttgtgtgaaagccagctttgaggggattagcttttgaaacaatgaacagcttgccttgaacttgattattgatctattgactgtcattaacaacaacttaaacattgtcttctgtgaaaattttccttgaagagtcctgttctatgtctttgccctttgacctttaacttgcaaactggcacaaactgaaggaaatctggtgttgcttctccattggattagttgttctctaaaacctagtaagcatgagctgtttccttagagtggagagagtggtgatggcagatctgcagatggacactttgctctttacatgcacactctgaaaatgccctataggtagaagtgaattttaatttcattttaatataatttcaagtctaaattcatcattttagtacaaattacaaaaactataggaaaaaaaaaacctcaaatacttgaatggccagtgtggcttttatataaagcaggaattttatactagtaaaaatttcttactcatttgctaatacacatttccagatgatttttaatgagtgtaggtatacattcttatttggaaatggatagtttggctgccttgaatttatatttatactcaacgtagcatgaaaattagaatgccttttggttaaactacatgtttatgatttggttggggaaaatattttataattgtgggtggcatgctgcaaagccttgcagattgttatttcttacaacctgagcgtatatagtatgagcctaagaaaaaagaagagtaagaaaagaagaatggctttacagtaaaatatcatacaatgcagacaatattttaagaggatattggagattatgtacgcaagggccaagaaagcaagaaatgagaaccagagtcagccctgtagctttacttcagtgcttccattctagatgatgctgatattataaagagttagtcactgctgctaagcatggaggactatatacataagctcgtttatacagtgtttgcttgtgggagggtttaatccttttagggccttgatgtcaagaaaaaaataactggaaactatattttgctaaagatagaaatgaggaactgtgtcattttgggacatgtgcaaatcattgaggaactccatcaccctgcattgaaaattgatttttttttcctctaaaatgagaaagaaactgaataagcaatctgttgcctctttactcattcatcacaatatcctgattcgtcataaggctatcagtatataagggctagaaaataatcatagcattaagaaggaaggagtctatcattatgcttgaattctggcaaatgtcatgaataagggttgggtcatatttactttaatatgagacaagatttatgtgataagcaaaggcatataaggctgctcttttgaacagaacatttcagttatcaggctgtactattacaagagataagaagacaataaggacaatgtaatcacaaacagtgggattccatttgtttattgtacaccagctactttgtgggtatggttcctgactcctcttctacatgaggtttgggaaaaaagtctcaaaccaaatggaacagtgaaagggaaagtaattcatctagcacataagaatagtgattcaaaaccaatgcagaataaatttccatgggtcaataacataaggtgtcagttcagtgttactagagatatgcaaggcataaaatattttcatcaccccatcactaataacatgaaaagctcagacataggatttcccaaattgaaatgaaaacacattcatgcctgcaaaaataattctccttctgcttcatttctcattactttatctaatataaacacaaatgtaaacaaggtaatggtcttcatgtaaaatgaccatatagttaagaattttagtaaaatattgttgttctgtgtattattaaacaaatgcaatgaagtattaaaatagctgatcagtttgaatttcctgtaaagcagtaattccgcatcagaattgtagataaggttgtgaatttattgactcatttcagaacagtgtctgttgacatggcagtcagagcaggtgaatacagatgctctttctgattgcaaaggttatagagctaaattagacagcattatgtgatactagcaaagacaacttctgttataaatcagagggcaaggcttttctgaatcgatgtgataaattactaagtaatgattaccaaaaataattactaagtaataaaagatacagactggtttactgaaataagcaagtgttacatttaataattacctataatctttttttgttaacacataagcaagtgttacctttaataattacctataatctttttttgttaacacataatttggccatttcatatactgtgtacctattttcattccctctctgtgggtcattaaaaaacacaatgtggtggataa

SEQ ID NO: 15929 - DNA, 138 bp, Homo sapiens
caaagaacaatcaggaattgaaaatttaaaataaaaggccatttacaattgcattcgtaaacaccaaataccgagggatcaatctgcaaaaaaatgtgcatgacctctacattgaaaacaacaaaacactactaaatg

SEQ ID NO: 15930 - DNA, 2246 bp, Homo sapiens
ctgaggattttaaaaagaagccatggaaaaacttcctagtaagcatctacttcaggccaacaaggttatatgaatatatagtgtatagaagcgatttaagttacaatgttttatggcctaaatttattaaataaaatgcacaaaactttgattcttttgtatgtaacaattgtttgttctgttttcaggctttgtcattgcatctttttttcatttttaaatgtgttttgtttattaaatagttaatatagtcacagttcaaaattctaaatgtacgtaaggtaaagactaaagtcacccttccaccattgtcctagctacttggttcccctcagaaaaaaattcatgatactcatttcttatgaatctttccagggatttttgagtcctattcaaattcctatttttaaataatttcctacacaaatgatagcataacatatgcagtgttctacaccttgcttttttacttagtagattaaaaattataggaatatcaatataatgtttttaatattttttcttttccattatgctgtagtcttacctaaactctggtgatccaaacaaaatggcttcagtggtgcagatgtcacctacatgttattctagtactagaaactgaagaccatgtggagacttcatcaaacatgggtttagttttcaccagaatggaaagacctgtacccctttttggtggtcttactgagctgggtgggtgtctgttttgagcttatttagagtcctagttttcctacttataaagtagaaatggtgagattgttttctttttctaccttaaagggagatggtaagaaacaatgaatgtcttttttcaaactttattgacaagtgattttcaagtctgtgttcaaaaatatattcatgtacctgtgatccagcaagaagggagttccagtcaagagtcactacaactgattagttgtttagagaatgagaaatggaacagtgaggaatggaggccatatttccatgacttcccttgtaaacagaagcaacagaagggacaagaggctggcctctacatcactctcaccttccaaatcttgtggaagtgcatctacttgccagaaccaaattaacttacttccaagttctggctgcttgcaggtggaactccagctgcaagggagttagggaaatgaaggtctttttttaaaagcttctcagccttcctagggaacagaaattgggtgagccaatctgcaatttctactacaggcattgagaccagttagattattgaaatattatagagagttatgaacacttaaattatgatagtggtatgacattggatagaacatgggatactttagaagtagaattgacagggcatattagttgatgaaatggagtcatttgagtctcttaatagccatgtatcataattaccaagtgaagctggtggaacatatggtctccattttacagttaaggaatataatggacagattaatattgttctctgtcatgcccacaatccctttctaaggaagactgccctactatagcagtttttatatttgtcaatttatgaatataatgaatgagagttctggtacctcctgtctttacaaatattggtgttgtcagtatttttcctttttaaccattccaatcggtgtgtagtgatgtttcattttggttttaatttgtatatccctgatagctataattgggtcatagaaattctttatacattctagatgcaagtctcttgtcggatatatgtattgagatattacacctagtctgtggcttgactgttttctttatgtcttttgatgaatagaagttttaaattttgacaaggtcaaatttatttttttcttttgtttgatattttttctctccaatttaaccccaagatttcagatattctgctctattatataaactttatatttttatatttgtgatctaccttgaattgatatgtatgttgtgaattatggatcagggttctttttttcccccatacaagtatccagtcattgtaacactgtttattgaaagaattatcctttcctcattaaattaccttgccaattagtaaaaaatcaattaaccataatggtggatctgtttctggactttctgtttggttacactgaaatgtttgtccatccttgcactcactcataccatactgccttgaattactgtagctgcatagatgctccttaagttgggattacattgtaataaacgcaatgtaagtt

SEQ ID NO: 15931 - DNA, 1563 bp, Homo sapiens
agttggtggccgcaaccacttgctagtgatacactgtatctaaaaaataactgtgcactataagggagtaggctgtattttcttttatatctgtaaatttaactgcatatagataattatccaggatgtgtggctcattcttttcagcttgtttctatactgtttgtaatatacagtttttgtaaccatatgattgaaaagaagaaagtctatgcttaggccagtcagtacacccaattttaaaaaataacatattcttgctttcacaaatatagttgaacaagatttccctaaaaattccaccaggattaatctctaaaattctagtctctgatttgcaaatgcacatttgtcactgaataatggaattatgtataacaagccaaacattcttattttagacaaccatagaactgtcccacaaaatatttctaagcttatttctaactattaggaggaatgtgcttttccatctaaaatactcaccaaaatatagttaattgtggctttatgaagttaacagtctcattacagatttagtttaccaatcaacagcatgtctactgcttggatccatacaaaactatcggttcaagttgatgtgacaagggaagggagcaccagatgacacataaatctgtctgattctatgcctgtatttccaacaaacttactgtcagagaatatgacctaaatccattttctaaactgttttcatgtgttgcaaattattctagtcaactgctgttttatgtcatactctgtgtaatctctgattaaatttaatatactgcatatcctggtgtctagtttgcatacttcctggattttctttctatgtagaactgttcatttccaccaagggtatctgctgcctctgaaaatatttttttctagctataacaactctattttttactacataattaaattttaatgtaaaattcatagcatcctgattattgaatgttatatcatcaatacttttgtgtattctgtggattctatatttcatattgagatcagcattcaaaatagttctatttctatctgcaaatagtttcaaatgagtttaaaaaaataacatctgaaaagaaatgctaatgtaatcatttatcttatctagcaagaagattctaaaacattctttaacatacatctaagtcagtttcacatatttgtagctagaatatcctatactggttatagttgatatgtaacagttggtgattttagatttctttgattgtgaaacagggagctatgagagatgtgtccatgtgaaatttacagttactgcctaggagttaatgatcgttctgggtcagcttgaatgtccccattctataaattcaacacttattttctgaattcataaaaataaccaaaaaatgtgagctataatgtttccctcaagaacaaacagaaacgagatttgccaaaaactaaaattcaacaaatgatgttgagtgggagattggctttgcctttagcgtgtaaatggaagcactgccattagactgaatttaactactaagaataaataaagaagaaaataacctt

SEQ ID NO: 15932 - DNA, 2297 bp, Homo sapiens
ttctaatgagatacgtgattgtcaagagcctagtgtgctatctaaggtctagcagtcacttcactagtgggcagagacaagttctaattgtattacagcacaaacaaaactgactagtttttaaattgcacaattttttttttttaaagcaagaatcattttctgggtatgtaagtgtaaatgtagatgcaaatttggctgcacctctttatcatgcctgtattggcctataggtctgcactttagtgttttttaattgttttatttctgtgtatttacgaacagagaaataacccaaatattatttctgcttagtgtctttatttataaagcccatgagtagtttgtatgcatctttcctacttgtaaagatgagtaaaagtatgcagttttaaatttataatattattggatgttctttgctttggtagtctttccagaaaggataaacagtggtttttgttttgttttgttttattgtttaagtgggaccacttagcttcccgtttccttactagttaaagaacagacattaattttcagttgaatgtatttttgcaggcatcatattgttacagggccatttacacctattcacaaagcttaaatcctaccttgtgggactgaagtgctcttaatataactgtttattttcactgtgtaatatgcaaagcaaaagggaaattatttggtggatggtagctcaaaattggaactcttgttctaattcagttacattggctttaccctccttagatttttcatcaaagggctgtcccattgcaatcttactaaaacattttgttaaaataaactcttttcctttttatattaataattaggcttttaaataaagatgttattcctttaaaatggtgggcttaccatcattgaagatgtcactcaggtggccttgtttgatcaaaacgccttttttaaaaaccaagctttaaaaacatgtttataatttcatgaagtacatatatattgttcccatagtcttcagctttaaaactataaatatgcccaaattttgttatttgccctactttaagtaggtttattgtgtttgttttttcagtacttgtttttctctgataagactcaggaattctgaaatgtgaaattgtctcaattctttctcttgtagcatgaatcaaatgtatttattaatagcacttatgactatagaatataatttggcatatgattcatattacatatgtattcgttttatttttaaaatagtttataaacttaatgatttttttttacaaatgaggttatagatattaatgcaaattttctggtaggtatctctttttttgctatgatgattccaacttatcagagacctcccatttgccttttcattacggtgaaagctttgccctcatctactaaagtacaaaggaattctttggaagcagattattctagtcttatgctagagatgaatttgatcattttaatgtgtgatctttttgctctatcaggtataattgttttcctttcctttataatgggtaagttttctcacctttgagtaacagtaaagttcatttatatgtccatacctagaagaccagtgcaaatactttgagagcacctgggtctacaggacataattggcatctaaatcctcatttcttgctattagtaggaaaacagatatagtattgtaatacccttattctttttgaatcctaattactcatttcggttttttttctctcttttgaatctagttgctggttttcgtttaatgattttagtttaacaatcccaaccaacaatacatttgatttatttttttctgtctaacctgacaacctttttcttgtgcttcttgtttgttggttagtttttgtgaaaggaatcattgtttaagatcactgttttcatacttgttttacacttcacgtattttgaagtacatttatttactaagcatttgtgacttgaataatttcaccaaatgaatacattttggtagtttgtaatgagttcttctaattgttacactttgcttggtacttaacaataaatatgtaaaggtaaaagaaataattttctgtattctgccaatcttaattttatataataaatcatccatttttttcttaaaatagtatggattgactgtttctaaaataccaatctgtggctgtggtttttcttttcttcagcatttccagcatccaagtaaacaatagtcccttatagtcctgctacttgatgggtaaatttggttgctgggtttttaagttgcactcacaataaatcgtgcaaagcat

SEQ ID NO: 15933 - DNA, 1406 bp, Homo sapiens
gcttgtttatgattcagtaatgcaggtgagagtgtctagcagttcttggtaagctactctggacatctttaaattatttatcctaatggattccattctggtttatgtataatcgtttcaagactttgggagtcttttatgaacaaatgctcattgcactatattatatgcaaattgttttgctgctaggttttcaaaatttgaataataaagccttttcatgttcttttacatctcttatagatatttttggatttgttaccaaacattacatttactctcacccttttattatttttaaataagttatttcattacttgctgatacatgagtattcctaagtgtttataaatatttctataatagtttcacatttatatttacattttaattaaacagtatcaaaattgcttgcttaaaacctaagcaatatgcattttgcttgaactgcttactgtaactttaacctaagattatagtgaccttattcaggaaaaaaaaaaaaatttagtgtaacttcaaagacttgacattcttgtcagaggaaaaaaaatttctagatactgtttgcttgttttttgttgtttgtagaaagataaaatattttggtagtaatttaaaatacaagaacgaatatttatttgtccacagttggagatgttggataaatgtcttttctcaaagatcacaggacttttgtctttcatttttgcctttttatttaccatttataaaagatctggtctggattatggaatttaatgtttatcagctctatgtattcctttatagaggcttgaggaagtatttcacataacatgttttataatacttaaccatttatccaaagatatatttacattgggttgtgcccctttcccttagatcatggtaaatttttcttattgaggtaattatgtactacttatatttgaaggaagcttatgacattttacagtagctaaaatgttgagattagaggtacttttactattcttctcaaaggtaactgatcagataattacccaaattattcaagaaaatagatcagaaataaagaacaacataattttctaagaattcattgaaatttatggaatcagctctcgcactgcccatctttgcagttttgaaaaagaaattgcttaatcacaaatgttctacagtctttaaatgtagtagaattagacagtgagatcatctgagtaaattgattggtgattccagagataagactaatattttaaattatttatgatactgattagtataaaaacgtactcatcacagaatttgaagcaaaatacatgtacacttcaaagagtaaatgacaaatgtataaatgctgtagctcaggattatatgtacctttaaaaatacactaataaagattattgttcaaaaa

SEQ ID NO: 15934 - DNA, 1318 bp, Homo sapiens
acgtgaactcagaactgtcggaggaaagacaacacaaccaacgcgaaaccaattcctcatcctcagatgctcaaagttgttttttttgtttgtttgtttattagatgaattatcctatttcagtacttcagcaagagagaacctaactgtatcttgaggtggtagtaaaacacagagggccagtaacgggtcgtaatgacttattgtggataacaaagatatcttttctttagagaactgaaaagagagcagagaatataacatgaaatgatagatttgacctcctccctgttattttcaagtagctgggattttaaactagatgacctcattaaccgatgctttaccaaacagcaaaccaagagattgctaattgctgttgaaagcaaaaatgctaatattaaaagtcacaatgttctttatatacaataatggaaaaaaaaaaaagaggaaaaccctcaagggcatgagcattggatacagcagtagacattttaacaagaagatgaatggcgtccgtgggttgctaactgaactttgaagacccgctacaaaacgcgcagatgtgcagcagattggaaggagacacagatgttcggtttttttcctgtttctgaaaagaaataataatatccaggtcaacagaatgaaaaatgaaagatgatttgcaatgggatgtatgaatacagcagcaagaaaaaaaaatgccataatacaaaaggctccatatatatatatatatatatatatatacacacacacacacgcacatatacacacacacacacacacacacacacacacacacacacacacacacacacacacaagtaagagactcagcctgcagttaattagcattctggcagttttgacatcagccagctgccctaaataacccttcaacgtttcttcacttttgcaaggttccacagagtaagacattgggtctattccagctcattcattttatattgaaaaaaataattttaaaaatggtggcttcagctccagcccctttccaaaatttttcaaccccaccctgtttggatttttaattaaaaactagtagttctcttggtgttaaaacacttctgtcctgtgaggtttcccaatggtgtttttcttgtaaatgtgttggacaaatgtgaagatgcattgtagtttaaccatatgcccacatttagtctctttattcctagttggtgagaaacctgtatctttctatgctgcttttatatctgtatgtattagtgatatttctctagtagttaaaaaaaaaaaaaggaaaaaaagactctttttggttgtcctcaag

SEQ ID NO: 15935 - DNA, 1905 bp, Homo sapiens
agagagagcatttctaaattcagttatcttccttgcagtattgatggagtaaaatacatttgttttaaaaaagtgttttttttttaaattatctaatgaaatattttatttttgacctgtgaatagaacaaatgtaaatagtagaatgtgaatctggttttcttttgcttgcaaattgccattctttttttttttcaaatttaaaattacacatgctgtttttttctttgatggggagaaagaactcattccctgagttcattcatttttgttgatgtcatcggtaatcttcaagacttattgaagtagagttgtatttggggaagatacattttatattcacttttttttttctttctgtagtctacctcttttactcaaactgtataaggaaatagtgactgattgttcaggtttggcattttcattgctacctgcctgcagaattaatgccctcttccttgtctaagatattactgtgttaagtgtcctgttaattataaatagttcaaaatggacagactgtcaacttgaaatttacttatgtaaaaagcttaggtgattcttagggtttccatgttcataactttacaaagctttataaaaataaaattgcaacttaatagagctaattaacttgtatttgtataaaaagaaaaaagaattgcagctcgatattgtgaagtttttcaataacttcattaaaccatatttatgatgggagggaccagacattctatagtaataatgtatagtgctgtgtataattccatggtttcttcaacatcttatcaaccaagtaaaattaatacaagatacgcaaaagatagtaaaataagaatctaattataggtgcaaggggactcaggcttatgctggaagaatctgacaagtggtatagtttgtttttctaggaagaatttactgatgagtcacataacttgcatgtaatattaggttctcattttttagcttcgaaactgtgtccatgcaaagactctataactgttaagacttgtgtggttgaattttgacttctttgatattcagcatttagtgcatacattttgcaactagggaatttgattttctatacccacaataatatttatggctaacatttattaggcacttactatgtgctaggcactgtaagcactttacatgcataatctcggtattccctgtgagtacagggttaattatttacctctatttcacaaatgagataatgaagtgggatgaagtgcgaggttaagcaacttgcttgaagtcataggtagtaaatcgtggggccaattttaacccagacagaccactgactccagttcatgcttttgctgcctcacttttttaagtggtatttttaattaggaagaccatgctaaagatactttcaaggataaatgattattttctcacttcaattgttggtttaaaattagcataaataggtaaaaccagcatgctcaaacactgagctcaaacattaacattactaataaaaaaaaaaagagtgactttaaaagtttctttctatccagggtttctcttgggatactcatatggtatattactggcttatatttcaaaattattttattcaacatgattgactttggccttttataatttacataaaacataattttcctcagttctgtaatccagattttccccattgagtaaataatacaattaaatttacatatggtaatttagacatttaataggatattgcataggtagaatactttgtcagtacttagttactacctatatgtatttttgtgttacttttcagtgatttaaagaaatctaacagaaatctgcttaaatttgttttaaatagtgaatatcctgcttgctatggaatgaataaacaggtaaatttgatatgaaaaa

SEQ ID NO: 15936 - DNA, 1076 bp, Homo sapiens
atttgaaaaggaatgtttgaatttatatagcaagtgctatttcagcaacaaccatctcatcctattacttttcatctaacgtgcattataattttttaaacagatattccctcttgtcctttaatatttgctaaatatttcttttttgaggtggagtcttgctctgtcgcccaggctggagtacagtggtgtgatcccagctcactgcaacctccgcctcctgggttcacatgattctcctgcctcagcttcctaagtagctgggtttacaggcacccaccaccatgcccagctaatttttgtatttttaatagagacggggtttcgccatttggccaggctggtcttgaactcctgacgtcaagtgatctgcctgccttggtctcccaatacaggcatgaaccactgcacccacctacttagatatttcatgtgctatagacattagagagatttttcatttttccatgacatttttcctctctgcaaatggcttagctacttgtgtttttcccttttggggcaagacagactcattaaatattctgtacattttttctttatcaaggagatatatcagtgttgtctcatagaactgcctggattccatttatgttttttctgattccatcctgtgtccccttcatccttgactcctttggtatttcactgaatttcaaacatttgtcagagaagaaaaacgtgaggactcaggaaaaataaataaataaaagaacagccttttcccttagtattaacagaaatgtttctgtgtcattaaccatctttaatcaatgtgacatgttgctctttggctgaaattcttcaacttggaaatgacacagacccacagaaggtgttcaaacacaacctactctgcaaaccttggtaaaggaaccagtcagctggccagatttcctcactacctgccatgcatacatgctgcgcatgttttcttcattcgtatgttagtaaagttttggttattatatatttaacatgtggaagaaaacaagacatgaaaagagtggtgacaaatcaagaataaacactggttgtagtcagttttgtttgtt

SEQ ID NO: 15937 - DNA, 1051 bp, Homo sapiens
gaacccagggtcacccagatgtccctttgatggccgttgttgaaggccattgggaccaataatctatattagattgaatacttaagttagatgtggtttcccccattgtagcagggagctagcgtattagccttgtgggcaacatgatgcatgggaaatgaaagatttttgtaaaaagtcagtatttatttccaggaaaagcctgaccttgctatttgaacacccaagactctttagaggatgtgtttggtgttcacatgtgtttcttctattttggatagtagagaagtaaagcttacaaagaatgcctagaacaagaacttttcatcattaaaaatttttcccagtgttctgatatgtgactttgaggccaatgagtcataaacaaatataagaaagctgtcaatgagtttcttcaaaggagggaaaactttctacgaatctaagatccatggagctagaattgtagaactaggctcatcagaatcgtgactattattgctccatcaaactgtgaaaagaaatgatgtggaccttgctggaaacaaaggcttagcaaacaatttttgttcaatgcccaccaagacatatagaattgggaactgatacatgtgtcccttataggctcaaaaattatatcttacaatttcttatttagggggaaattatttgaatcagattctatttagtcaaaccaccttttatgttttattatttttgaattcatggagccatcataaaaatatttttaaaatcagaattattgataccctgtagtgcaaaatgtcaatttttaatgtataatcagaagtctgaatttttataaaacatatagcataaaaacttccagtactttggttgacccttgtatgtcacagctctgctctatttattattattttgcaaaataaccattttaacatttgataaagcatatttatgaacatatttcttaataagaaaaatatccattttattaccattttctatctttttcaaaatatgcaagtttttacctatatgtcttataataaaagaaataaaatatttg

SEQ ID NO: 15938 - DNA, 209 bp, Homo sapiens
tgaaagattacttctgacattccattgctcttcttttgaaaattagtatggtaattaaatgtactttttgaaaattaatagaattatttaaattacagtatatgttgcaaaatatatcacttttgatacaatagtcaaaattgagtggtttaatgttttgtaaatattaagtgtttaaatgaaaaataaagatgtgcttatatcattgt

SEQ ID NO: 15939 - DNA, 334 bp, Homo sapiens
aaatccttttgggaacatcttaactgtatatgaacatttcacgaggacaataaaaataagacattgaaggaccaatttagacttagcagttatctggagacatctgagagaatatttttatctgaagaaagcagaatttgtttgatacctaacaagatttcaataaaaatccaaactttgtatgtacgtttgtatatattttcccttttttgtatgactatttatttagaaaatttctaggtgaaaaactaaatgatgttttgtatttttcttgcctatagcacagatattctcaaactttctcagctcatgacactatttagtgcctcagtac

SEQ ID NO: 15940 - DNA, 152 bp, Homo sapiens
aaagccagtgattttgttaaaaaacaaaaaccctcatctcccttcctcccaaaaagacataaaataaccggatgagggggagataaaactgaaacaagttggtcattgaggaaatatgggggtaacattttaaataaatttttgttaaagtg

SEQ ID NO: 15941 - DNA, 1404 bp, Homo sapiens
agaagataactaagcaaacaagttggaattcaccaagattgggtagaactggtatcactgaactactaaagttttacagaaagtagtgctgtgattgattgccctagccaattcacaagttacactgccattctgattttaaaacttacaattggcactaaagaatacatttaattatttcctatgttagctgttaaagaaacagcaggacttgtttacaaagatgtcttcattcccaaggttactggatagaagccaaccacagtctataccatagcaatgtttttcctttaatccagtgttactgtgtttatcttgataaactaggaattttgtcactggagttttggactggataagtgctaccttaaagggtatactaagtgatacagtactttgaatctagttgttagattctcaaaattcctacactcttgactagtgcaatttggttcttgaaaattaaatttaaacttgtttacaaaggtttagttttgtaataaggtgactaatttatctatagctgctatagcaagctattataaaacttgaatttctacaaatggtgaaatttaatgttttttaaactagtttatttgccttgccataacacattttttaactaataaggcttagatgaacatggtgttcaacctgtgctctaaacagtgggagtaccaaagaaattataaacaagataaatgctgtggctccttcctaactggggctttcttgacatgtaggttgcttggtaataacctttttgtatatcacaatttgggtgaaaaacttaagtaccctttcaaactatttatatgaggaagtcactttactactctaagatatccctaaggaatttttttttttaatttagtgtgactaaggctttatttatgtttgtgaaactgttaaggtcctttctaaattcctccattgtgagataaggacagtgtcaaagtgataaagcttaacacttgacctaaacttctattttcttaaggaagaagagtattaaatatatactgactcctagaaatctatttattaaaaaaagacatgaaaacttgctgtacataggctagctatttctaaatattttaaattagcttttctaaaaaaaaaatccagcctcataaagtagattagaaaactagattgctagtttattttgttatcagatatgtgaatctcttctccctttgaagaaactatacatttattgttacggtatgaagtcttctgtatagtttgtttttaaactaatatttgtttcagtattttgtctgaaaagaaaacaccactaattgtgtacatatgtattatataaacttaaccttttaatactgtttatttttagcccattgtttaaaaaataaaagttaaaaaaatttaactgcttaaaag

SEQ ID NO: 15942 - DNA, 4506 bp, Homo sapiens
tagtttcaagttttgttggttggtttctcttggtttgtgcttacatgtatggatgtgtgtatatgtacagtgaaaatgttgtctctttacaaccaattgataaccaatcacatagttttatcagtgtatttagacactatcttgaaaatcagatttatatgctgtgtatcacataatgccttgcctttaacatttactttttttgtacactttttcagattatttctggaaacatatcaatataattacagtgtttgggggtgtctttaaatatattaggttatacattagtcagcattttaaagacatttcttcccaagtacgagaataggcatctttcattttcattttattttgtattacttaatcttttaagcaagcaaaaatttattctcagggtcagctgtacactttattgaccagtacttgataatctctctgtatatgatgaatacatttttacacactaacattagcattaacaggtgatagttgccatggatataatggaattatggctggactttcttttgaaagaaaacttgatgtattctgtgtgtatggtttttccccagattagtcatacagttcatttggaattcaggtacattaagctttagtgaagagtgcatgcagtaattccaatgtgactgcatgacgtggtacagacattacaggtgttgtagacagaggcacttgtctcgtgcagagggattaaattagacctgtgagattatatttggaaaaattcatgtctgtaactaacccattagtgcagtatttaatttgttactattccttcccgccaattctgtccactcctcacctcgcatcagctataaatttggaagtacttgtccaggcactcaagtgacttcatatttctctctgcccatgggaaaagagataggctttatatttccacagagtgaaaaatcctctgtcatggagcctgtcctgccaagtggcaagagtgtggggactgtctggtgatgatgtctttcatggcatctgagtgaagagtgacaggttggctcaacttttttctttttttttttttaattgccttgtattgtaagtattcttccctgcagtccaagtgacttttcattttttgttttaacttcaggcaaaatctttaaccactctggcctctgtttcccccaccaacggggagcagtgacatttacctccctcacagagtcactgtgaggattctatactgatttgaagtggagctgttcagaactgaaccttgtaggaaattccaagggcctttctactgaatctggtgatggggtggggccgtggcactttctctgccacagctgttcttcacagtgttggtgctaatgaggccagggtgcagggttcgattcacacgtaggccagttaacttagagaaaatctatttccttacctctagccagtcacttcctttttccgcagttgtgatgggttttgctgagccatccactctgactgatttcctctgaagtaaacatatttacaatccaaagcaattctactgacagaagtgttgccttcataatcaaacagcttgtttttccatctcctctgcaaccctaattaaatgagtacaggtctacaaaatgttttcaaggagaaaagcagcatatccttaagtgaagtattatatttttcaataaccctgtagtggcttgatgcagggaaccctgggggactttcagcgaagagctgtgctcttttctgactagattagagcgtttggagtggaagacgtcaaatgtgtagtgagatggaggttttacattgttcttctactggctgtgatgaagtgccagaatgtctctttagaacaagagttagattccccctttctccttattgccccttccgttttgacttcccctttatttatttgttgtctaattaggggccaagtctgtaaagttttgtcaaagtgagttagaagttgttttctcttactatttgtgtttaccagagttgggagataagatagtttccatgaaggtgtgtatgttttatacgatgtttgttatagggccatgcattggtaacttgaaaatagaccagcttaatgtcttcaggatgtaaaactctgaatacacggcgtctctttttcatacattgcatgtaagttgttagtacctcacaagctacagaagttcagccatgagattttgtttggcaacatgaacagatttgtgtataactgcaatggcctttttttccagatttccttattgactttttgtttgccttacctggggctagttttttatgctttgtacctagaaaacaaaaaattacattcgttgggctttttttcaaggttgggattaccacaccacctggaatatcatactgtggtttctgcctaaaattggcacatgtaagtattgaagaaaatggttatataattcagttgaaactcttggttattagatgttaggcatctcctgtatgtaagacacaaggccaaccacaacacagaacgatgttgacctgttaagtattctctgaaacatggccaaaatgcattttatgagcttttttttttgctattgtaaatattagtggtttacaatgcgctttagacatatttctttaaaatgcaagcagtgagaaataagacctctctgaattagtagctctaaactgttaacatagaatgttacttggaaaaagtctggaatatgtggtgtacacaagcagtgcttcgtgaatgagtttcttagcttttatagtgcgccatgtttctcaaagtttgtttttgttgacaaaacattttataatatatatcttatgtttattttttttctcaactaattgtgtactgcactgtaaggtgaaaattagccatccattatttatcttctgtggcaatgcatttatatggttgattgggtggggaattttttgcagaaagatgcaaagtgattgggttttcgacttcctatcgcagggagcttttaagaaatattaatttcctatacatttttccaatccccatgcaaactgttcctgtttacataccttctctgttgtatcagtactttgagtgagaagacagtttatttaaaacttgagcaggctgttcagcattgtttctgcttctgaaatctgtatagtacactggtttgtaatcattatgtcttcattgaaatccttgctacttctcttcctcctcaatgaaatacattatatattatctttatgtactcttaagaaaaacgagcaaggaagagtatcttcattattctcattttctctgagttggaaacaaaaacatgaaggactccaactagaagacagatatttacatttaaatagattagtgggaaaactttaagagtttccacatattagttttcattttttgagtcaagagactgctccttgtactgggagacactagtagtatatgtttgtaatgttactttaaaattatctttttattttataaggcccataaatactggttaaactctgttaaaagtgggccttctatcttggatggtttcactgccatcagccatgctgatatattagaaatggcatccctatctacttactttaatgcttaaaattatacataaaatgctttatttagaaaacctacatgatacagtggtgtcagccttgccatgtatcagtttcacttgaaatttgagaccaattaaatttcaactgtttagggtggagaaagaggtactggaaaacatgcagatgaggatatcttttatgtgcaacagtatcctttgcatgggaggagagttactcttgaaaggcaggcagcttaagtggacaatgttttgtatatagttgagaattttacgacacttttaaaaattgtgtaattgttaaatgtccagttttgctctgttttgcctgaagttttagtatttgttttctaggtggacctctgaaaaccaaaccagtacctggggaggttagatgtgtgtttcaggcttggagtgtatgagtggttttgcttgtattttcctccagagattttgaactttaataattgcgtgtgttttttttttttttaagtggctttgtttttttttctcaagtaaaattgtgaacatatttcctttataggggcagggcatgagttagggagactgaagagtattgtagactgtacatgtgccttcttaatgtgtttctcgacacattttttttcagtaacttgaaaattcaaaagggacatttggttaggttactgtacatcaatctatgcataaatggcagcttgttttcttgagccacggtctaaattttgtttttatagaaattttttatactgattggttcatagatggtcagttttgtacacagactgaacaatacagcactttgccaaaaatgagtgtagcattgtttaaacattgtgtgttaacacctgttctttgtaattgggttgtggtgcattttgcactacctggagttacagttttcaatctgtcagtaaataaagtgtcctttaacttc

SEQ ID NO: 15943 - DNA, 1610 bp, Homo sapiens
gaatgcagactgcacattcggacagatgcatccatgagagtggtctccatgaatcatcatcatgtttagacaatagtccctagcaataccattccctgtgggaaaaggcagtgaattttattgatacaactacatacatttttgaagaccaaatggactaaggaagatcatgtattataacactttggaattattcctgatacatggatgtttcacttagtaacaggcatctacattctttactaatctgtcttctgtttaatagaggtttgattatggagttccatacaaatatctagtttttcattagcaactgcaatattgattgctaatacgtttagcaaatcattccccaacttgtagcagttaaagtggataaagccggccagggcaaagagatcatttaggggtgtctacaacacttcttccagtcagatcttttgttgccaaagatcataatttggacatggcagaaaccaggtgatcagtggctgactgaagggtgttcagaagtagttacaggtattttgcaaaaacactgcctcatagctgatcttacctcatcaactcaaagcaatgttatgcacaatattaaatacatgttaccagttttagcttatttttccctcttttgttcatttaactatcaaaagttattttctattttgattacccaataatatataaaaagagtttgatgcacccaaaatcacaaaaatcctaatacatacaggttattgttggattttccaagtactttctatcctttaatgcctaaaactccatcaagggaagtaaacagcaagtaatataatttttcaggcagcctgtggacttctctggtaggatcaggttgacatatcgtttattaggtgagtaagtgaaaagacaagtaaagcataactgaaccaacaggtaacctgttgggctccttcctgacatcactgagatctgaggagccctacaatagcagcacattcaggaaatcaggtccctcaaaatttctagctcccaaccccattgagagattttgggagctttccaatctgccacaaactccctgctacatatgtactatatagttcaaatgtgtgatacagagcaccctgaaagggaataattgaaacaaagttataatcttcttagtcttatgctaaatttattccagccaccctactgaagggaggaagatctgatcattagaatccttttcctagccatgacacatttacatacttgtaaaatttattgtagtaagtctagcattgcaacagaatagatcttataatggccaatcctcacacttttgtattaaggatattatgacagactaagcatggtagctcacgcctgtaatcccagcactttgggaggctgaggcaggcagatcagctgaggtcaggagttcaagaccagcctggccaacatgataaaacaccatctctactaaaaatacaaaaattagctgggcgcggtggtgcatgcctgtaatcccaactactcgggaggccgaggcaggaaaatttattgaacctgggaggcagaggttgtagtgagccaaggtcgcgccactgcgctccagcctggacaacacagtgagactctgtctc

SEQ ID NO: 15944 - DNA, 2229 bp, Homo sapiens
cggtgcctttcccgccgccttggcccggaaccaaggtgggccaaggtccgccttgcaggggaggcctggctgcagagaggcggaggaggaagctggcgctgggggaggctgagggtgagggaacagcctggatgtgagagccggtgggagagaagggagcgcagccttcccagtaacttctacctgccagcccagagggaaatatggattttcacaccttgcctggccaccctggaaaaacaagccaaggaggatttcttttgttctgttttctctctctctctctctctctctctctctctctctctctctctctctattactgtggctttggatttccttatgtgtcttacaggctttgatagaaggggaggggaggagagatgcatacccgtttctcaactgctccatggattgaaaaaataacagtttaaaaagggaaacaatgtgggaggaagaatcaccgttgacgcatcttgatttggttggtttttacatgtgtaaagaaggtggggtctctggccatgtcatagcccatgtcttgtgccctcccacacagaaagtgttagatagggaaattggcaaaaagaatagttaagtcaggaatggtcctgcctatagaagagctttgagagaggtgggcccacgggtgcccctctcacccatttgtgtactctgtgagtttaccagctctgccctggcctctttcggtaccaggaactggcaaccttcatctcactcctgagggcccaggtctctgccttcattgttgctttttctggtgggggcaaggggagctggtatggatggaatgacaagaattagtccaaatggaaccccttgaaggataatgagaaaccacaaggcctgcctctgactggggctgacacggaggtgcattagcccaggctggaggtagcccacccaaatgccctttctgattctaattgatttctttcaacagaatttgccaaaattcagacatgcacttctaaggggaaggtgattttccagttcaaaaaaatgggcaggagtggggaacaaaacaattaacgtaagagctacaaaggagggaaaaggaaccaagaagtagaaggagtcccatcaggagggaagatggtgggcctcagggaggatggggatcaagggacaggccaggagccaggagtggggaagggagggatgaaaggggacacaagtccctgtctctgaagtttctttaaaatctgagttccctcccctctctttgacattcctgaaagattaccagccagcaatagcccagggctcccccaaaagaattggttcagattgtaattatcagttaggcaatgtttttaaaacttagtaatgagaaactgtgaaaagagccaagtgttacattgagcttggggtgggagatggggaacaggcagtgaggaaggagacaggggtggaattcgtcttctgggaggaagctggagagagcacagtgaaattgaaatacccattcccagatagtcaaaaacatgaactttcccccagcctgcaccagtattgttttcaaacattgcccatgagtaggccctttgaagagttagcttcctcctcatctttgactataaaattgtttaatcaatggaatttgtaccagccttttaaaaagttttagtttttcctaagtgattttgctctcttccaatctaaacctgttgcttgtttggttcagagaactacaaactgtcaaagaaagggtggggatgataagaaatgctaatataaaaatgctaagtgaaaaaaagacttggccaggagaaataatttaaaatgcacatttgctttggatgcactgttgttctgttaaggctgtatatatttgtttatttaaggtgactgaaagtgcaaagaggaaatggacagcatgcaattcatcctaatgtacaaaacgttatatgcactcaaatgttataatttctaatatttttaaagtttatattcgagttgtacaaagttaagcattaatcagatatttcattttttcataatgttaccattttcttaaatattattacaaaattttaagtctgtctaatggagagttttttttaaactgtctacctcatataatacaagtatttacaacgctaaagttaccagaggtcaatgaataatcaaaacattttttacagtacacctttcctggatgatatgcaatcgaatgctatattattaaacgcatttttctcctta

SEQ ID NO: 15945 - DNA, 548 bp, Homo sapiens
tcatgtagttgaagtctgtggatgcagctgttatgaagatggttaaacttgaaacaaacaattttaagaattatttggtctgaagatgttttactttaaataaatgtctattgtaatggctggagtttttgaattccaaaccttatactgaataactactgaatccctttactgttaaatttttttccaaactttcaagatatatttagttgtgtttaactgctacttggagctcagaagccactttatcagttttcctcactggttggatagcctatcagtttatggaaggatataacttccgtaagttacatccttatggaagctactgaataaaagaagggggtatgcaccccctagtttgccaagattgagaaatagcctcttcactggtatgcaaacagatttgattttgcatcctatcatttaaaaagaaattatgtctgcaccccaacataggcatacttaagtaatatacatactcctgtgctaacatgtatactagaaaacaaaaagatgttagaaaaataaaagtataaagacaaatc

SEQ ID NO: 15946 - DNA, 74 bp, Homo sapiens
atttttatgtatgttaaaatgcagtattgtaaagtgaatatatatatgaataaatgaatatatttttaaatgcc

SEQ ID NO: 15947 - DNA, 3104 bp, Homo sapiens
tcctgcacaagtctccctgctacctcctgctgggctgctcctggttgactacatatttggctctctgccttctcttcatgttggcctctgtgtactatagaccctttggactttagttacaagaatatggcatttatgatcatgttcttttgcctcccatagcctcttgcttttctacgttagtgtcacatgttatgtgatcgcacccggactgttcatatgttaagcacacatactttagatgtgtgctccctgttatctacattgcctggaccttgttcttggctctggcctttcctacttgtctttaacatggacactcatgagtcatcctccaggacgaccagtgcatcctcaagctctgctccttcagggccagtgacttgctgggcttcgtgttcatgctggccatgcatgtcatctatgcaagcgtttccattgccactgcagaatgaagccagtgcacatggtattagtcatcagccagaacttcctgttctgtgggtctggggtcaccagctgagatgtcacctgctttatttctggctttggcctgtggtctgtgatacccatcctgcttgatgttctgcagaatggcacttgactgctgggcatgcatgaagttaagggcaagaaacagtatgccatgtgttctgtaccatcatgtgtctcttcttgcttctgggcccttctactggtgaactttcatcaagatctgcgccatgccgtgtcactatcaagccattaagttttgtctgggttgctgtcagccccagttggcttcctggtcaacaaggacctcaagaactgcctgtggaccgaggccccctaccagtgcatgagacacacacctaccctccccagctttccaggaaccctactggctgccagactgatgggcgggctggtatgtgtggacatgtgttcactgtcattatgctgtggctccaggtgagggtgaggactgggcctatatagaatccagataccattgtcaacttcccttattcccgtctaagatgtgagcagagtgccatagtaggggttctgggaagaggtatttctgatttgtgggcctctgcttgcttgacttcaggtcacttatacttcttattttgcttgcctgccttcatccctcatttcctccctctcattcttctttcctccctccctttcctggtagcctcctttcctcctcttctgccttccccttccttctttccttattcttttttattttgtttaaatagtaccacagagaaaacaactgaaaaaccacatttttctacatacagctggggaggtagctgagaacttggcactgcgcacacatactaggttgaaagagagttgaggaaaccagaaggccaagtggatctgctggcaaaccctgaacctgtctcctgcgcttgctctacagttctgaagttgaaaatccttttcatgcctagcatctgcttgagttataaaccccaaggcagccatgtcatagactagtgtttactcttgttttgactttgttttaatgcttcctaagacccaagtgcctcctgctgtttcctcctttgtggtagcctctggccatctggacctcaatccccagctttcccactttcagcagtcctttgctctctttgcttctacctcaaatagccccaggagtgggctttagtctccaatatggagcatctcaagcttctcctgggggatggggattgggatgggcagaatctgttttggatctccgggttatttccagtgggtgtaaaagcagagctgggcctttccctctcttatccctgagggtgggtaagaaggactgtatctacacctgttcttccctaccttctcttttgttagggaggcctcattctaagttcctcaagagagtccttggcttaaagctgtagcaagggtgtgctaggtgggggatttggagcaaaaccgtcgagtaggcatgatactggtatggagtgggcctgcaaaatcagacagaaatggcttgagaagccgcagggggagcatgcctgtctctcagtgatagagtatgggagggacctccctagcttggaaaatgagaattgaaggggttatgaacaaataggatgcctagttgaggatgttcccaaagttttgtccaatcttatcattagtagattttataagccacagagacaaaccagaaacggaataatgttactttggatgctttatttttttgttctaggtgtggctttgtacatgcagaagaatgctatatgctgcacattttgcctttaaagtcttacgactttccccattttagtctaatgggaagatacagatgtgcaagtctgcttttttgttttttgttattatttttttttttttgctctgtgttatggacattttcagacatgcacagaagtggagaggatggtccttggaccccatgtgtccatcacctagctgcatcacttatcagctatggtcaacctggtttcatctgtatctctctcttttcacctgtattgtttattgaaaatccaagacactatgccaatgcaaccgtgactactttgggagattggtagtctcttttgatggtgatagtgatggggtgcactatcataatcacatcaggtctgctttttgcttttaatgttaactaatgaagttccagagatgggccttagaaatgtgttttaagaattaacaaggagtctcaaaaagaaatgagagggatgcttcctttcccttgcatctacaaaacaagagagagactgttctgttgtaaaactctttcaaaaattctgatatggtaaggtacttgagacccttcaccagaatgtcaatctttttttctgtgtaacatggaaacttgtgtgaccattagcattgttatcagcttgtactggtctcataactctggttttggaagaataatttggaaattgttgctgtgttctgtgaaaataacctccccaaaataattagtaactggttgttctacttggtaatttgacaccctgttaataacgcaattatttctgtgttcttaaacagtataaatagttgtaagtttgcatgcatgatggaaaaataaaaacctgtatctctgttat

SEQ ID NO: 15948 - DNA, 86 bp, Homo sapiens
accttttcacctacaaaatttcacctgcaaaccttaaacctgcaaaattttcctttaataaaatttgcttgttttaaaaacattgt

SEQ ID NO: 15949 - DNA, 503 bp, Homo sapiens
gtgggcccagtgctgtgtagtctggaattgttaacattttaatttttacaattgatgtaacatcttaattaaccttttaattttcacaattgatgacagtgtgagtttgatgaaaatatctgaagctattatggaaataccatgtaatagggagagttgaacatgaatattagagaaggaatccagttacttttttaaattacacctgtgtgcacctgtattactgaatataggaaagagatacccattacatagttactcagtaaacaaaagagaaataccaggtaggaaagaagagttactattcctgagaaataatcaagaacatatttaatttaaactaatgatgtgaactatttagttttgatgtccgttatgtgattctgcttttacttgagtaaaattaaagtgtttaaatttgagatcaaggagaagatagtggaacaaaatgttatatagataatatttttctaatggaaataaaataggcagatttcctttgg

SEQ ID NO: 15950 - DNA, 892 bp, Homo sapiens
cttatcctatggaactttgcctgatggaagtgactcaacaaagagccaaagtggagagaagaaagaggtctaaatgctgagaaggatggctgttggcctgttattcgataccacctttttaaaaaattgcacatgttcaatttgtgtcagcagctcttttataagctaacatgtgctagcattcatttcagtcctttcccccacctcagcgtctatggacaatcggggacttcctaagctctgacagtctaatatttccatggaatgtgatttggagtgttccccacaccctggacctctccctagtgattatctagccagctacaccttactcagagcccggctgctctagcaggaatgttgcacagaaacatacatttgcggtttggccacaggtcgcataggtggcttctcccacgggtagtgtcagttgcttcactttaaaaagtcacttcagccccacaacctcactcccaaaagaaaggtttgagagcgctcattttttttctaagacaccttttataagcctccctataaaaatctcacctttcaagtactaagttagaattgcaagtcatcttttctgaaaactaatgctatcaaagtcctcctttgaaaattaagggtctctttaaaattagaatttataaatggcattcagtgatagtgtacaccaaaattaaaagaccttgactggtgggctttttacgtgtaaggaagaggaagtttaagaagtaggactctgcttgtttcagtagcccatgtactaaaataggaacaatgcagagattagcacagcccctgcacaaggctgacacataaattcatgaagcgttagagacaaaaagtaggactaatgtttgtttattttttaataaaaatctagaatggt

SEQ ID NO: 15951 - DNA, 1208 bp, Homo sapiens
gtctaatttcctctctgtttttaactattctggagaccaagaaaccactaggaattgaaggaatatttggatatttttaatcctaagattttgccctacaattaggcagaggtcaaaaagtgacaatggtacatgcccaggtaaattcccaaaaggcagaattgacagttgtatctgctgtgcattcactctaagatgaggagaacaaaagaagtgtattctcttgttctgtcagctgcataccagtaataaaactgttatgaaatggattttcaaggtctctaaaccttgaaaatccaaagctattgttgcattgtacagcactgaagggctttatgttacaatattctttattcctatctagtatactaggctatttattgtatccccttaggtaaacttatttatttatgctattttgctttgtttcattttttaaggacaagatcaggatagctttggtgaaggtagggtcatattaatatgatgataatgtgcaaccaatttatactttctgcagggagctatggggtacattccttgatttccaggatagtttttcaaataggaaagcaataatggcagtagttctcaaatgggctaggccttttttatattgaagcaataattccatttttaccctttgaaattttgtttttttgatttttgatgtttggtacaaatagaactatatatatttaggtaaaatagatctatcgtgtttaaaaccaaagaaatcaatggaacccttgcacaaaaaagtgtgataaatatttttaaataaaaacttaatacaaatgtaatttgttaatattgtttcatgttttatgtgtagatctaatagctgaactgattcaaactgtaataagctcatcaatttcatttctatgaaaatgtgctctgttgtcacaggatgtttctgttgattttattcatttcctgggaattggtaaacatcatgttcctgatgataacccagtagcaaaaacatttgtactgagtggtacaagccttggggactgaaaaaaaaaagattaaaaccattaaaaagaaactcatttttacgctgaatgaacatttatatgattgcattgggaccagtcatttcctaagctacatatggccatcttgacagtgttttttcttttgtgtgtttaattattatgtgtaaatcataaagacaaataaatttcactgtgccacccagc

SEQ ID NO: 15952 - DNA, 122 bp, Homo sapiens
aatttcttcaggttgaattacctagaagtttgtcactgacttgtgttcctgaactatgacacatgaatatgtgggctaagaaatagttcctcttgataaataaacaattaacaaatactttg

SEQ ID NO: 15953 - DNA, 148 bp, Homo sapiens
gaattctttaaaccagattctgctgacatgagaagctccagtgatttgtttttttgaaggtctgtatcagagcaagcctaacatctaaataaagtttgattctggattttccaggtgggaaataaataaagaaaatttggcttgtctt

SEQ ID NO: 15954 - DNA, 370 bp, Homo sapiens
agagactaaatatagaactcccccatgcagtgttctatttatctgacttaaaattatgaatattttgaatacatgcaaatcttcccattaatgacaggtgatgattaatttcctattttgtatatattataatcgatgtcattgtatgttttctttaaagttgttttgaaaaaattttattttactatgtcattttacccattttaataacttggtattttaaataaagaattttcattgttgttatatgtatgtactttattgttttatgtaacattttaaatttgtgcatttcatcactcttgacatgttcttcaatcattttttaaaaaatagtttttcagataatattaaagattttgaactctag

SEQ ID NO: 15955 - DNA, 1496 bp, Homo sapiens
gcccataaatgctgcagaataattaccactgtacaaccgtgtttggagctggttgaactacatgtgactacttaagtttcaggttaccagcaaaagccgggtttcattatcataatgcagatacattttctgtgttcagcaaggcattgtgtgtcatgtggatcttagttaccaaactatgaagtgaaggctttaaaagtgcattattttaaggataataaatttgaagagcaaagcatgttttgtgtgtttgccacaaaacattgcttgaagcacatacttagatagaaattggtcttaatttatataatcaatataaaatactaatgcaattctacagcattcaaatgaagaaaacttgaggctttagggataagtggttagtgatattttattgaaaccactaaagagataagtttaaaagaactgcataggttactctcagtatatgatactctgtaacatttctatttatatcggcataaatttcattttttttcttcatatgcaatgtggttatataaagcttaatgcagctcatttgctaccatttggatacttagacactttgagcaagattgtggcagtttttgcacaactttgaaatagaaatacctggtactctatcttgtttattgttgatgccatcttagaggaaaaaatgtaaaggtaagtaattaagcatatgacagcaacaaataagatacataaaactacaaaataaagtcccattaggttataagtattacaaaaaatccacctttctctaaggggaagtttgtaccccattgattcttggtgcctttgggatcgactgggttttaatggcctagttatttgaggattttgctgtgttgttttccatgtcttctctggtcaccttggattatatataaaaatacaggaaatagataaacatgaatgtgattaataatgctgaaaaagtattagcctaccaaagacacactcaggctttagtgaataactttacataacctcagtttttaacacatgcatatcttctccaaccatgaaatcaaagcacggtgcagaacttgtaccaagtacaaaaggtccatgtatgattagcattattttcttttgcttttgtttatggacaatgttcagctgacataagcagaagttggccaaaatactgcctgtactgttaatttcctgtataattcacttaaataaaagcaggttaacctcaatgatagcagttaaaatgttctatcttatgtatttcttttaagtattaccattatggtgctactgagcgttttcttttggtaaaaagaaaaatgccatgggctgcagtcttcttccatcacttttccctaccaggtccattaatatgcttataacactagtgccagttattttatttgataatgcttatggtatttgtatatttgtttgcattccaattttgtttaataatgagtgtgtaaactgcatacgttaaataaatgtaaatactaatgtactgctgc

SEQ ID NO: 15956 - DNA, 1781 bp, Homo sapiens
aggagctcatggaagatgaggcaattaattgcctgtttcctggcttccaatgtttgttctcagtttctcagaatttttcttagcgcaaagcagtgagggcagtacatgttctttttgcatttttaattattgtaatccttttagataatgatgtgttcatttgaactaactacatactatgatcaagtatattgcatcctaacgctacctctgactcaacctgactttgtaggaaagcctacacgtagccttgtttgataaaaacacggaagtgactagagaatggaagataaaggaagaagctaggaagtccttgctatcaaaaccttatcctaatataggaccaattgaagtattcaaaaagaaaaacagtatcttatatgattagtttttgttggtggttttgttttcatttatttttgcaagagccactttttatttactttctctagggataagagataaaacttgaagtacttttttcaaatcttgtgtgcaaattagtattgttagcatctatttggcttattttagtatttttaagtctagtcacaaaccaaacaaaacttttgaaaatgagctatattttgttcaaagataattgatttgatcttatatttatttgtttttaggataatttttgatctttttgtaaactgctttgcttgttaatatctgtgaaaaataaatgagttcattttgttcactttccaattttcccgagtatcctagtcatcaaagataacagttcatcagaattacagtcagaaaatcctttttctactgaatagttagcagggaaaaataattctgatatttaactgtcataattctgtagtgctattatagtgaaaaactcagttctataagctagctgtgttgtcacagttttatcatagttcataattatttcatgtgcaatcctatttggaggccctgttagacttttaacaatcccatccatatctgtaattctctgatggcaagaatggatggagcatttctgagttaacagtgctggacagtatcgtactgggtgtcataaactctttatgaatggtaatattatgtaaattgaaatctggccctcaaactatattgcagctttcagcagtatgtttgaaggcctcttttgttaatgattctgtaatgtatgaattatgttcttgagtggttaaaaaagaatatgaaggcttgataattatttattgggtaaagtcaggaaattgtagtgaaagaactaatggttttgttttttggaataaaggcacctaagctattgctaattgaattgctgctagaattagaaattatgctttagaatagaattggtatttctgtgattctttttgcttcttggtattttctcttgtatctatgtatctagtattgaggcttgctctttcatgtggctttatcctctctttaatagctgttgtaaaattcctgagtaactggctgcttcaggatcagcttgcagagtcttgcttttaggttagatacaaacaaagtaaatcatagttggtgtaaatccagcaaaaaacagctggctttggaatggagaacactacaattcaaatttgaagtatattcagaagaaaactttggaattagctttacatttgtttgtaaatctaaacaaatatgcaaaattggtcaaaatgtaagtatatagcatttttaaagattaatggttccttttatgtgctgatttctttgtattctgttctctgcattcatcattcaggaataccaccaataaatgtatttatatatccctt

SEQ ID NO: 15957 - DNA, 970 bp, Homo sapiens
agaaagctctcatattttaaaatatccttggaggctatctcaagacagtgaaagaacttggggattcaggtgggctacctaccatcagtggaggaaatttgacctcttcccatttttttggcattaacatggactgtattcatcaaggtattataccacagcactctatggaaatctcaagattagaaaaaaaaaaagaaccaagttatagagttagtttttattttatttttgcacttcgtcatgacagtatagagtttgtttttaatgtctcataaatgacaagtggcaaattcaaatcaactcatataaaactcattctattttttctctaaaatagatctttatatggcttcatgaagtcttttatgtgttttgaatttacataaatgaaagtctcataaaatatcataaagatattttggatcgatttctaaagatgtgactcttcaacggaggagaatagggctctgagaaatggaatcactgaaaaagaaacctgggttctctgatctatccacacagaactagagcaaggaggtgatgaaatactgatctctttcctcacataagtctgagcctaccaatatggatgtactcaaagtgaaacgctgccctgttctctgcttgaccattgttataattttattctgtccttagagtactgaaggcagttcaataatcaacatgctatttggaatgttttaatttggaaagcaataaggctctgcacctgatatcagataccttataattctcttagctttaaaaatatgtatactttctcacaaggtttttccttatctagcttcatttctctcatggtaattaatgtaattatgtatagaattaagaccacaataagggagatgatcagaggaatctgtatagtgtaattagaaaaagtacaatattctaatgttctaactgggttgtatacctaattatataataaatacaaaataattcc

SEQ ID NO: 15958 - DNA, 444 bp, Homo sapiens
attgatcagggaccatgaaaagaaacttgtgcttcaccgaagaaaaatatctaaacatcgaaaaacttaaatattatggaaaaaaaacattgcaaaatataaaataaataaaaaaaggaaaggaaactttgaaccttatgtaccgagcaaatgccaggtctagcaaacataatgctagtcctagattacttattgatttaaaaacaaaaaaacacaaaaaaatagtaaaatataaaaacaaattaatgttttatagaccctgggaaaaagaattttcagcaaagtacaaaaatttaaagcattcctttctttaattttgtaattctttactgtggaatagctcagaatgtcagttctgttttaagtaacagaattgataactgagcaaggaaacgtaatttggattataaaattcttgctttaataaaaattccttaaacagtg

SEQ ID NO: 15959 - DNA, 2007 bp, Homo sapiens
ccggccttccaacttttgtctgcctcattctaaaatttacacagtagaccatttgtcatccatgctgtcccacaaatagttttttgtttacgatttatgacaggtttatgttacttctatttgaatttctatatttcccatgtggtttttatgtttaatattaggggagtagagccagttaacatttagggagttatctgttttcatcttgaggtggccaatatggggatgtggaatttttatacaagttataagtgtttggcatagtacttttggtacattgtggcttcaaaagggccagtgtaaaactgcttccatgtctaagcaaagaaaactgcctacatactggtttgtcctggcggggaataaaagggatcattggttccagtcacaggtgtagtaattgtgggtactttaaggtttggagcacttacaaggctgtggtagaatcataccccatggataccacatattaaaccatgtatatctgtggaatactcaatgtgtacacctttgactacagctgcagaagtgttcctttagacaaagttgtgacccattttactctggataagggcagaaacggttcacattccattatttgtaaagttacctgctgttagctttcattatttttgctacactcattttatttgtatttaaatgttttaggcaacctaagaacaaatgtaaaagtaaagatgcaggaaaaatgaattgcttggtattcattacttcatgtatatcaagcacagcagtaaaacaaaaacccatgtatttaacttttttttaggatttttgcttttgtgatttttttttttttgatacttgcctaacatgcatgtgctgtaaaaatagttaacagggaaataacttgagatgatggctagctttgtttaatgtcttatgaaattttcatgaacaatccaagcataattgttaagaacacgtgtattaaattcatgtaagtggaataaaagttttatgaatggacttttcaactactttctctacagcttttcatgtaaattagtcttggttctgaaacttctctaaaggaaattgtacattttttgaaatttattccttattccctcttggcagctaatgggctcttaccaagtttaaacacaaaatttatcataacaaaaatactactaatataactactgtttccatgtcccatgatcccctctcttcctccccaccctgaaaaaaatgagttcctattttttctgggagagggggggattgattagaaaaaaatgtagtgtgttccatttaaaattttggcatatggcattttctaacttaggaagccacaatgttcttggcccatcatgacattgggtagcattaactgtaagttttgtgcttccaaatcactttttggtttttaagaatttcttgatactcttatagcctgccttcaattttgatcctttattctttctatttgtcaggtgcacaagattaccttcctgttttagccttctgtcttgtcaccaaccattcttacttggtggccatgtacttggaaaaaggccgcatgatctttctggctccactcagtgtctaaggcaccctgcttcctttgcttgcatcccacagactatttccctcatcctatttactgcagcaaatctctccttagttgatgagactgtgtttatctccctttaaaaccctacctatcctgaatggtctgtcattgtctgcctttaaaatccttcctctttcttcctcctctattctctaaataatgatggggctaagttatacccaaagctcactttacaaaatatttcctcagtactttgcagaaaacaccaaacaaaaatgccattttaaaaaaggtgtattttttcttttagaatgtaagctcctcaagagcagggacaatgttttctgtatgttctattgtgcctagtacactgtaaatgctcaataaatattgatgatgggaggcagtgagtcttgatgataagggtgagaaactgaaatccc

SEQ ID NO: 15960 - DNA, 2200 bp, Homo sapiens
gtgaattcatgacacctttgactcttctactgtctcagaccttaggtaacatacctgcagctgcttttctaacaaactgttgatcagcaaaaataaaggggctacagaaacactcatttttatgctgttccctcttgggcttcatgcaaagacaattctgtgtaaatgtacagttgactctgatttggaaatatgaaaatcagtccatccttgttataaaaaatttttttacaattgtaattatattgatgttcatattgtgtaaaataactcatttaataaaatagtactttgatttacgacatcacaggataaatggttttagaaattctgttctaactttccacattatttgccttataaaaatctaatgaattcatcagctagaattgcaagtgcaattcttatatccctttctctgctcagtggcaggttcctcagttaaactagagcagactgattcattaaaattgtgcatacgattttatgggcagctgatgatctaggtgaaaaatgacttatctgctgccttagtatattgcggttatgtgtcattgtacccctctgatcatttcctgtgtttgagttggaatatttaaaattgcagtatgacctggctctaactgccagtcaggtgtaccctgtagataactgatagcttcctaaaagcggttggattgtcagtgagcccttgtgaaaggttaggttctaatgtatatgccgtaatgaaataatcattaagcctattgtttaatgcaaaatatggaacaaatgtgaactggtaaaggtcgatcttgatactatattctttgaaaattcttgaagttctttaatttgaaattgaaacattaatttttgaggtttttggaagttactatttggccatttttacaaatggattttgcattaacaggaagattggaatgacttgtggctggattaattcccagaaccctctccctcctttcttttctaagtgagttgttgattttaggagtttgctttgtgctgttacctaaaatcagagactggtgtacagtatgacttccatctgaacttgaaaagtattaaaatgggtcaatattcacattcttttagatctcaggatgggaaaatgggtttgttcagatggatatggtaaatcttacccaattaaggaaggctaattttagagttcttctaatttgcttgtgtcaactcttaacttgtaaaactgctgttaactcggtttaaatttttaaattaatataatagaaagaacactaaaatacttactggtaactgcttagagccatttatctgatcctgtggattacagaatgcattccctcttctgctgtagcttatcattgctttgttttgtagctctgcatattttgcccaccttgtcttccctgtaagtttaagacgtttccaaggaaaagcttcagggctgatagtttcttagcaattcctattcttatgcccttactttaaaatagtccttttattttgtgtattttatttcctaagtttcagatgtaatatctgttgtttcctaacatgtcgattaccagaacgttagaattttacctaatttcttgtggatattgcagaagttctggttaaatcacaacttaaaagtttttaaaagtgctttgagcatatgtatatgtttagtgacaaatcatataaaaccattcacaagttttggttttttttttttcgtttgttttagtgactaattcaggatgaaagtttttttgttcttgtatttaacccttttttataagcagctgaagacaccatatttaacactatatctcagtgatagggaaatagctgcattgatcttacatgagcataatcatccttatacttcatgaggggattattagtacaatccccattttactgtgtttgagttaaaaaccaaacatccctgtaatttaatttgaagattctttaacagattgcagcaaagttcattataaaactgttatggtgtcttcaaagacttgataaaataacactgagagagaattggtccatttgtatgctgtatttctattacttgccaaaaggaatggggttaagattaaacttgtttccattctcttcacatggatattcatccccatgtttaactgacacactgggggctcagttgtgtgctgtaatgtcttattaaagaagatattaaagaaaactaaactagtct

SEQ ID NO: 15961 - DNA, 2766 bp, Homo sapiens
gccctgcgcccaccaatcgaattgtagagctgcttgtgttcccttttgattcttctttttaacaatttttttttttttttgccaaacaatatcaatggtgatgccgtcccctgtgcggtctgatgcgccttcctccgtgacgccttcagcttcttttgtcgtggatgcttcgtgggaatgcccagagccccagtgtgcttgtggagagcatggacagacttcgtggtgttcattgtttgatgatttttaatcgttactattatttttttttattctaatgtctctgttctaaaacgtaagactcgggggttggggcaaaagaagggaaacccatccagtcctgtgattctattgcaagcttcaaggggcttttgtttgaaagacaaaactccccacctgaatctgttgtcacacgtgccgtaggggtgatggatggcaccggatgctggattccccaagaacaagttaccctctggggtgaggctattccagcgagctgggacatttccccatgggggcccactcccctctcttccccagcaggctgtagtttctaagctgtgaacatttcaagataaattaacagaggagaggaaaaagatggctcagctattttttcacaggtttacactagttgagctaatatgcgtgtctttggaaattaaacacaaatggtaacatattccaaaaccagacccatcttgttgcctattgtgataaaataaaaagacggctgtatataacatattgggtaatgcagaccaaattaagtgttttgccttgtttaaatgaaatgcatgtttagtgagcactaatacaatcttattccagaagactgtttttagtagcttattgtgaagtaagacaactataatgaatgtctgtcttgtttggaagtcatatctgtctttgcacaaatgtaccaatcgacaagtatattttatatattccataaaaatacaaagtaaccctgactagggcccaactttaattttgaatgcatttccagagtggccatgcctagagggcagatgcagagcaggtggtagtgggacaggacaattggagcacaggaatgttaacatgtatgacaggggaccagtagggtggtttccctctcaggcccagcagcccattgacagcattagactggcggcatggtgcttttctgagcagatcaatactctgcagactcgaaaaaacatcacatacattcttggaacttcccagtggtttaatctatgtgcatggttagggagccaggtctggaatattcagtttccctgcccctgttaaagaatcagaggttgggcagtcatcaaattcatcataaagacatgggcaagtgtgtctgtggtttccaaggcccccctatggagaatccaaaagtattttccattgccgtgctctttgaatgcagacttctatttccagaagtgacagcacaagtctgagttgctgtttggtctggtgacctcagacacactaatttgaattgaaagctaagagtaaaaatttgctggttacaggcgagtcatactcttgcaagtagttagcaaagggaggcccaaattctcaaggttgttgatggggaacttgccactaagagaaggcagagaggtccctagtgggtatatttgctgccaagccacttgccaaagaagaggaaccacagaaagagagacatcatgaccaggagaaaaatgtgactagacatgctaacctccaggtttttatatatgacttgagtctgctgtaattggcagcagaaatccaaatttgtatggtagaccaaaaagaaccaaatccatagggtgaaattttgagacctagactctgtaaaaataatcctagtcttcctccaggggtcagttcctcacagtggttctgtaccaaaacttgccaaattcctccatggccaagtgttaaaatctgtgtttggaaaatagcgaattaacctaagacacagaaggcagactgggtgaggagacctagcatgccctattggcagtgctcaggagctgcatcccacttttccctgctctgaatcgaagtcctagttccttcctttgattctcctttggtaggtggaatcagttaatgttttgagaaacctgcctgggctctgcccttagtcatgacatctcgctgagccagacccactctgttccttggaacctagagctggagtgaggagtagaggtctccggctattccagaaagaaaagtgagccacatgcaggctgatgaatgccgacacttccagaatgtatagaaatagtccctgtcctggcctgccactgaccctgtctgtattttctcggaggttgtttttctccttctccttcccaggaaggtctttgtatgtcgaatccagtgcactcaagtttggccaagggactccacagcacccagaagactgcatgcctcaaggtttatgtcactcctctgctgggctgttcattgtcattgctgtgttcagggacctttggaaataaaacctgttctgtcccaaataaaaccagcctgtgatgttcaagggactggaataaagtggcttacgacctgaaggattctacagagtgctcaactgttcatacatcattcagagtgggagggagctgggggtgctgtcccatcccatctgtatgcccacggtggatttaataatatataatttataaatcatagcctatggagtggcccgtaaatcagttgactgtgtagctcttgcctggcattaaagcatgtttttggtttaacatg

SEQ ID NO: 15962 - DNA, 3630 bp, Homo sapiens
aaaacctcttgttttaaaactctataaacttgtcattggtaaatagtagtctattttcctctgcttaaaaaaaattttaagtatatcctttaaaggactgggggtttgctcaaaaggaaatccaaaacctattctaaacaatttgcatttatataattttcctgtttaacaacaagagtgtgacctaaatgcttttgtcttgtcactgaaataaaagatggcattatgtggttaagagcatggggcgaggggtcagacatgagtctaaggttctgcccttactccagtgtgtgacccttggcaagtcagttaatcttggtaaacctcggtgtacttatctttaaaatgggagtaatagtaggtcctaaattcatagagtggatattaggattaggatgcaaaaataaatgcttaaccaacactactactgttagcaccactactaattatcattcattgataatattaattgcaatgatgttgtaataaaatactctcatttccttaaaataattgtgattctaggtcctaggatctagaattagatctttgtatttttaatgcttaggggaagaatataagtatctccttaaaaagaacataattctcattcacgcaagaataagttctttgaattccttagtatgtagtgaagaaaatttagttgttagttgctttgggaagcctacttatggagtggaaaccaggaggttatcatggtagttgaccttataagaaaaatgattcttcttcagaaattaaaaacataactattgccagatttagctctggaatgtttagaatcaggctagaatagcattttccaaagaatattctaagagctattagctcctctagatatttttttgggggaaaaaggggattctgtggtcagatgagtttgggaaatgctgaacacttcattcttctttagcaagtacagtcagtacatcaaagactgagcagttcagtggtacataaatttatctcgccctgcatattcccaacatacttaacacagatgttttttacctgttaacatctcacccagctagtgttcctcagaacaaagattggaaaaagctggccgagaaccatttatacatagaggaagggcttatggactgagaaagggagaacatggtagggattattgaatcatttcaaatttataccagcctgaatagtgtaccagcaattgacttaggctgtgtttctttatggttttaaaactcttgagctgttataagagatagttcttttaatgtgactatgcaacatgatagccaatggtgagggaaaaggaggtttctctagaagagtctgatgaaaggccgggaaccaaggtttttgagaagtctgcccctatttatttttagtaagtatcaagaggtagcctgagcctagttagagttagacctgtctttggatgaagaagtcttaatactgaaatactgaatttttaatacattattatttggtattctgtataccccttcaagcagttgtttcccattcccaacaaactgtactttatacaattctggatgctaaaacttagagattttctctttgcataaattttggctccattctttccataacaatctaatcaaaactgggagttctcaagtgaatgcaaaaggagcaggccataactttatttgttagatacactgtcagaaacttgagatcttttggcctatgataataccattaatttttgcattgcttcagtttgccaagtgtttttacatcatctcatttgatctcaaaacagcttgacagagcaactgttattgaaatattacagatggaaagaatgaggctcagggaagttaaatgacttggccaagatctgctcatcgtcactgtctgtacagtatttttttttagaggttgtaatgtctcagatttagtcctttaccatctatgttgatttgcttttgtctatttcctcattaattgaatatactttaaatatatatattaaagtatcaaaatatagagagacatttgaactgtattcaggtaatatgtttaaagatatttatatattgccatacaaaaacttaacatttaaaactgataatatctgtaatgacatcagaatgaaagaaaaaaaattgtacagtgtatattcctttgttttgaatccaaatctttttcataggtaatgacagatgccttaatgtgaagcttatttataatagcaataaacctaactggatttggatgaagaagtcttaatactgacatactggatttttaatgcactggtttgttatttggtattctatctctttttccaggcctccaggttgcacatttatttattatgttcaatactttggttcttagttcttaaagaatcaagaagttgtgtaatcttttaaaaatattatcttgcagataaagaaaaaaattaagagtgtgtttacaactgttttctcttttttacagtacatgtatttaaatcattgctataataaagttaagttcattaggaatataaaaacttgcagttctatgatagattgcatttattaaaaatgtttcattgtatcacatagaaatatggccaggaaggacttgagaagacagtttgatccattgcttttagacaggactgggttttgctgtccaattatatacaataatagtttttcttacaactaagctggccccagccttgtcttgatattaatacatgaaatttttataattgtctcattgtctcatttagaaacatccatatttttctgctttttctattgccattttttatttgtgcatgaattgattattgagaaaatgtagcagtttgcatatttaaaaattaatcattttgcattttacatttaaatatgctaacatcactgtcatagaattcccaaatttcatttgtagatactgaactaagggctaatgtcaggagctgatttttaatgataaagctgcagatgggctaaataaaagccaaattaatcctacaatcaggtattatgtttttaaaccaagttgagtgaattggtagtggacttgggaaatcttccccagcagaatctggatgaatggcacagaattgaaatctctttgtttcccaccatttccctttaagtgctctgctcctttgtaaaaagttaaagatttgaaagagaatctcatattcccgaggcattaggaagaaaggatttaatcccttcaatttggggcttaatcttgtttaaaaaaatgtaagtgaagatggaaggctggagagaatgattgctttttgtacagttaaataaggtcacaatattcttacatactttgttttacaactgtgttttcattttttcaaatgtctggccatttagcaaagttatttactatttactgtgtacatagaaagctttattatgtgtggtgtatctaaattttttttgctgaaatacattatggtcaatcaagccaagcctgcatgtacagaatttgtttttttttcaaataaattagttgttttcttatttttttggcttagtatgttgaaataaactatggtatcttcatcattttgtacatttcctttttgaggaaggtttctttataagtgcaagggctaccctaataaaggaatgtatatactta

SEQ ID NO: 15963 - DNA, 961 bp, Homo sapiens
agtataaaaagtgtgtattgctgtgtaatattactagcaaattttgtagatttttttccatttgtctataaaagtttatggaagttaatgctgtcatacccccctggtggtaccttaaagagataaaatgcagacattccttgctgagtttatagcttaaaggcctaaggagcactagcaacatttggctatattggtttgctagtcaccaacttctgggtctaaccccagccaaagatgacagcagaacaacataatttacactgtgatttatctttttgctgagggggaaaaaatgtaaatgttctgaaaattcactgctgcctttgtggaaactgtttcagcaaaggttcttgtatagagggaatagggaatttcaaaataaaaaattaagtatgttctgtgttttcattttaactttttttatggtgtttaatttgtggttggctgcaactgtgtatcatgtatatggaacttgtaaaaaagttctcgacattcagatcttaagagatgaaatcacttttacctataaaaaccacttttattgcggtttgactgcattgagctctaggatattaaatgatatcactaatattttgcatgtaatttgctcatttgagtgagggcactttttttgtacatatgatggggccaatgcacaatacttttatcacaatcaactttttctttgtatccctatttcaatgagcagtcagtctcaagaggttactgcacttcagttctaactagacatttgtactaaggtatttcagttatgtaaactcagcctgggcactttctgataactgtaaaatgttttataagatcatgattattgaagatacattttggaaaattttaaatgttcgtgagcagcttaactacttttgtatctagccttttttaagtatcttgttacatttacttttttaaataaagaaattacagaagaaatgtcaag

SEQ ID NO: 15964 - DNA, 1347 bp, Homo sapiens
cagaccggaaagtgaagagtcagaactaactttggtctcagcgggagccagtggtgatgtaaaaatgcttccactgcaagtctgtggccccacaacgtgggcttaaagcagaagccccacagcctggcacgaaggccccgcctgggttaggtgactaaaagggcttcggccacaggcaggtcacagaaaggcaggtttcatttcttatcacataagagagatgagaaagcttttattcctttgaatattttttgaaggtttcagatgaggtcaacacaggtagcacagattttgaatctgtgtgcatatttgttactttacttttgctgtttatacttgagaccaacttttcaatgtgattcttctaaagcactggtttcaagaatatggaggctggaaggaaataaacattacggtacagacatggagatgtaaaatgagtttgtattattacaaatattgtcatctttttctagagttatcttctttattattcctagtctttccagtcaacatcgtggatgtagtgattaaatatatctagaactatcatttttacactattgtgaatatttggaattgaacgactgtatattgctaagagggcccaaagaattggaatcctccttaatttaattgctttgaagcatagctacaatttgtttttgcatttttgttttgaaagtttaacaaatgactgtatctaggcatttcattatgctttgaactttagtttgcctgcagtttcttgtgtagatttgaaaattgtataccaatgtgttttctgtagactctaagatacactgcactttgtttagaaaaaaaactgaagatgaaatatatattgtaaagaagggatattaagaatcttagataacttcttgaaaaagatggcttatgtcatcagtaaagtacctttatgttatgaggatataatgtgtgctttattgaattagaaaattagtgaccattattcacaggtggacaaatgttgatgttgtcctgttaatttataggcgttttttggggatgtggaggtagttgggtagaaaaattattagaacattcacttttgttaacagtatttctcttttattctgttatatagtggatgatatacacagtggcaaaacaaaagtacattgcttaaaatatatagtgaaaaatgtcactatatcttcccatttaacattgtttttgtatattgggtgtagatttctgacatcaaaacttggacccttggaaaacaaaagttttaattaaaaaaaatccttgtgacttacaatttgcacaatatttcttttgttgtactttatatcttgtttacaataaagaattccctttggt

SEQ ID NO: 15965 - DNA, 2258 bp, Homo sapiens
acaggcattaacgcttctttagatctgaagttgcaggttaagcttgtctggtcaacattccagtgtggaaaaataatttaaacaatcttattctcttaattcttttggcaacaaaaactattagtaatagctatttgggaccagacaaaatcagctttcatctataattcattggggataatgggagatttagataatgtatccagatttaaacctaccagtttgtcctaccccttaagcgtttaaaataaaatatgcaacaaaatggatgacttagtggagatggaagcccattaattgggttccccattaaatcgtttacatacaagaacacagtttttatactaaggatttgtgtttaaagtcttgtaaagttcatgtctttcacccagatatatcaaatgttagaagaccagtgtgacttcattagataacgtttagtgtatttagaatgtgtaaatttgtgctttgaactgtagtttaataaatgtaaaattgcatcatagtatttgttgacctaatgtaacccttgtatgattgcaataaaattttgtgtagattttactgttttttcaggctaaaactttgggaaaggggctagctagcaaaggtagttttgaaatagatgtgtatatggactgttttgaagggtttttttctttatagcccagttaagttttgtttggctcggtgcatttttcatttatttaattagtaatttaagtaaagtgtttggtaaatcattgtgaagttcagattcattatggagagttgatgtgcagtaagcatgatgtttaacaattttaacaccaaaaatgttaatcctgcataaatcaactgtaataataaataggtgtttctgtatagatagaatgcatagagtaccttagtaaatctttgaatcacaatcttttggctgaaatggaagattctgttaaatactttgaataaacttggggggagggaaataaaattgcagaaaactgcagagcactaaaacttaaagaagggctacatctttatccagaaacctgttgctcttttgcacggaatgtttaaattcagagttgggatgggggttggggtgaagcacacttattatcttcagttgcagtgatttcaaatttaggattttttgttgttggtttgaactgtccccttagtttcttgttatttccaatttgttctgcttagtcattacttttaattcttttcttactaaaattttatggtggttgggggaagggagttagcatcactaacctgacagttgttgccaggaatttgctttgtttactgctagtatattagaaatcctagatctcagaatcacaatagtaataaacaacaggggtcattttttcctaacttactctgtgttcaggtgtggaatttctgtctcccaagaggaaatgtgacttcactttggtgccaatggacagaaaattctacctgtgctacataggagaagtttggaatgcacttaatagctggtttttacaccttgatttcgaggtggaaagaaattgatcatgaatctctaataaatttaaatctcttaaaccagtaggtgcttaatattttttgatttgattaatgcccatttaaatctcatgggttctattaaaaatatatatatatagggccccaatccattgccatcaaattgcccttggacttttccaaggtatattatggggttttatgcaaaattccaagctaccatgtaactttttttaaccatttaacaaggagggggaactgtttcctaccttctttacatgttgtgcattgttgtggtccagaaatgccaaacctttttaaagatggtgcaactttgagtccttggcttgactatacaggccttgaacttcatggcatatcaactttgccatatctgcaggagagctgttctataagaaatagctcagagttgcaaatatcacatgtgaatgatacggtaacttttaagaaatgtctgtattgtatttgaagactgtttgccataaatctgaaatttgaacctatgtatttcaatttggtatgctaaaaagttctgaattaatgtaaagttttttgttataatattgtaatctcagttcaaaagttaactgcaaatataaaacccaatgatttctatatagtaaattgaactgtaaaggtaacttgtgtgtgattctgaatacatagataaatgtttttattcctcatgttttactttggcttctatctgaaatagaggtaaaattttacatatc

SEQ ID NO: 15966 - DNA, 1772 bp, Homo sapiens
gctcaaagaggacaattccagtatatctgcccaaggcagcaacaagctcttttgtgtttaaggcataaaagaagaattctgcatagaaacatggctcatattcgaaattgctctatagtcattagaagccagagaactgctaagtctcctgcaatgtttttcttgctttttgccttccccatatatatggaacttggctacctctgcctgaaatggctgccatcaacacaatgttaaaactgacacgaaggatagagtttcacagatttctacgttttattggtggaagctgatttgcaacatttgctaaatggattagatgaatgtacttctttttgtgagcttacttgcctggattgctttaaaattaacctttgtgcaataccaagaaaatagctctttaaaagaatgtctttgtatgtctcaaggtaaattaaggatttactgaataaggtgttgaccaaatccagaccattttattttatttttttatttatttattttttgagatggagtcttgctttgtcgcccaggctggagtgcagtggcgtgatctcagctcactgcaacctccacctcccgggttcacgccattctcctgcctcagcctcctgagtagctgggactacaggcacctgccaccacgcctggctaacttttttttatattttgagtagaaatggggtttcaccatgttagccaggatggtctcaatctcctgaccttgtgatccgcctgccttggcctcccaaagtgctgggattacaggcgtgagccactgcgcctggccagaccattttagaattgggaaattttagtgagaaaaaatgcactgtaaatatgctttagttttaattcagttgggatgcactacctagcgaaaattgagaaactatatacttctcagagaaatatctgacatctattgtcattccattgctattttttttccccagagacttccataatttaaaataaaatcctagatccagttcttgttttttggcataaatacttaatctattttaaatttataaaatctgagcttctaggatccagctgtgtcaacctttatttagcatatataactataaatcacttattacagatgctaaatagatcaccttttacagatgctgaaatgtttgggatatgtttgttgacaaggtaaatggaaatgagaaactttatacttcagttttcagatatatggatctagatcccaaataaatgattaatcttcattggtttctcaaattcaggttgaaatacaaattaatagcctttattgattttacttttatgagtcattgtagacatctataaatataaaagggcctgtacccaaaggatgccagaatactagtatttttatttatcgtaaacatccacgagtgctgttgcactaccatctatttgttgtaaataaaagtgttgttttcaaagccatctttaaatagttctttaaaaataggtcttttttttatattttggaaaaggcattgtttttaaagtaaagataaaatggtaagtacctaattgtatttactgtaatatcttataacatgcagatgaatgctttataagttaaatatgatgtattttttcatacttctggattatactataattcatatgaaatcttgatattagtccccacacggaaaaagtgaactgcagttgatatttggtgtttaagatagcaccattgtttaaataccgcctatgtactcccaaatgaataaaacataattcttgtcctctgagagcat

SEQ ID NO: 15967 - DNA, 416 bp, Homo sapiens
aaaaaatcagaggaaaggaggctgccattcccttcacagccaaacattgtcaacccatggagaagcaggccttattcaactccctaggatcctttagaaaaaattcaccactataggcttctttgattttctttcagaagcaattgctgtctttctcactgtgtttttgttgctgcataagattgaaggtataaatttatattattgtgatggaaaggctgtgtggaaattcattgatgatactttaaaatgtcatctttgcttgtactagatttcttacttagaatttttaaaaatcattttcttgtttaaatagtttctttttttaaaaaaatggttacattagttttaaaatagctctgtgattttactttttattgtaattaataaacattgagatcttcattttatacctt

SEQ ID NO: 15968 - DNA, 1434 bp, Homo sapiens
gtacgaatcacataagggagattgtatacaagttggagcaatatccatttattattttgtaactttacagttaaactagttttagtttaaaaagaaaaaatgcagggtgatttcttattattatatgttagcctgcatggttaaattcgacaacttgtaactctatgaacttagagtttactattttagcagctaaaaatgcatcacatattcatattgttcaataatgtcctttcatttgtttctgattgttttcatcctgatactgtagttcactgtagaaatgtggctgctgaaactcatttgattgtcatttttatctatcctatgttaaatggtttgtttttacaaaataataccttattttaattgaaacgtttatgcttttgccaacacatcttgtaacttaatatactagatgttaaggttgttaatgtacaaaaaaaaaacccttatactcacctgcgttttcatttgtttgacatttgtctattattggatttcattatcatatgaacttgtcagtgggaaacaaactgtctaaaaatttttctcttacgtttaacatacaatcatgtgaaatttaggcagagttcgataaattactggcaaaaacaaaactcttttataaagattttctaatgttgactttaatactctaacatggtacaaaccaaatggtaaaatcccaagtcatttcttttttcatctctatttagcaacagaattaagtggatgaagatattctactatgcattaaatcttgaactttataaaacatgtacaaaaattgtacaagataagttccacctggtaatgtctttccctaatacagggttgcgcttgcattggaccctagggatttgcactaaaattatatcaaggtctcagatgagcttagtgcacaagcactatcactttaaatactattatttgctaccacagcaactatatatttccatagcttttggctgggggcgggggacatttttattacaacttgaaattgctttgctggtttcatatttatttgttgtatttaaaaaatacattgttgtaagagtgattttttcaatatattttattcctgggggggatcatgctacactctcaaaagaaaattaagaaatcattcagatcatcccccctttttaagtagtgtgaattgcaaaacccaacatattttttttactgtcagttgcggtttatttattctttaactgtctgttttagtagtttaatgattatgaaaaatgtatctgtgtgtgatttgctatttattaaattttaagtactttgctgaatgtcattttaaagcatgtttgaagtcttgtgtatttgtctgtgttaatgctgtcaggaggaactgactaagatgttttaatatgtatcaaaaattaaaatgattttttttattgccttgaggtacttttt

SEQ ID NO: 15969 - DNA, 120 bp, Homo sapiens
accttcaaaaacaaaagccaaatttggcccactatggtcttaatgctaaatgctcatgtaggtaaaatgaaaatgcaaactctctgtaataagttagtaaatattaaacaatttttacat

SEQ ID NO: 15970 - DNA, 2371 bp, Homo sapiens
aagcgcaatgtcagaagcgattatgaaagcaacaaagaaatccggagaagctgccaggtgagaaactgtttgaaaacttcagaagcaaacaatattgtctcccttccagcaataagtggtagttatgtgaagtcaccaaggttcttgaccgtgaatctggagccgtttgagttcacaagagtctctacttggggtgacagtgctcacgtggctcgactatagaaaactccactgactgtcgggctttaaaaagggaagaaactgctgagcttgctgtgcttcaaactactactggaccttattttggaactatggtagccagatgataaatatggttaatttcatgtaaaacagaaaaaaagagtgaaaaagagaatatacatgaagaatagaaacaagcctgccataatcctttggaaaagatgtattataccagtgaaaaggtgttatatctatgcaaacctactaacaaattatactgttgcacaattttgataaaaatttagaacagcattgtcctctgagttggttaaatgttaatggatttcagaagcctaattccagtatcatacttactagttgatttctgcttacccatcttcaaatgaaaattccatttttgtaagccataatgaactgtagtacatggacaataagtgtgtggtagaaacaaactccattactctgatttttgatacagttttcagaaaaagaaatgaacataatcaagtaaggatgtatgtggtgaaaacttaccacccccatactatggttttcatttactctaaaaactgattgaatgatatataaatatatttatagcctgagtaaagttaaaagaatgtaaaatatatcatcaagttcttaaaataatatacatgcatttaatatttcctttgatattatacaggaaagcaatattttggagtatgttaagttgaagtaaaagcaagtactctggagcagttcattttacagtatctacttgcatgtgtatacatacatgtaacttcattattttaaaaatatttttagaactccaatactcaccctgttatgtcttgctaatttaaattttgctaattaactgaaacatgcttaccagattcacactgttccagtgtctataaaagaaacactttgaagtctataaaaaataaaataattataaatatcattgtacatagcatgtttatatctgcaaaaaacctaatagctaattaatctggaatatgcaacattgtccttaattgatgcaaataacacaaatgctcaaagaaatctactatatcccttaatgaaatacatcattcttcatatatttctccttcagtccattcccttaggcaatttttaatttttaaaaattattatcaggggagaaaaattggcaaaactattatatgtaagggaaatatatacaaaaagaaaattaatcatagtcacctgactaagaaattctgactgctagttgccataaataactcaatggaaatattcctatgggataatgtattttaagtgaatttttggggtgcttgaagttactgcattattttatcaagaagtcttctctgcctgtaagtgtccaaggttatgacagtaaacagtttttattaaaacatgagtcactatgggatgagaaaattgaaataaagctactgggcctcctctcataaaagagacagttgttggcaaggtagcaataccagtttcaaacttggtgacttgatccactatgccttaatggtttcctccatttgagaaaataaagctattcacattgttaagaaaaatactttttaaagtttaccatcaagtcttttttatatttatgtgtctgtattctacccctttttgccttacaagtgatatttgcaggtattataccatttttctattcttggtggcttcttcatagcaggtaagcctctccttctaaaaacttctcaactgttttcatttaagggaaagaaaatgagtattttgtccttttgtgttcctacagacactttcttaaaccagtttttggataaagaatactatttccaaactcatattacaaaaacaaaataaaataataaaaaaagaaagcatgatatttactgttttgttgtctgggtttgagaaatgaaatattgtttccaattatttataataaatcagtataaaatgttttatgattgttatgtgtattatgtaatacgtacatgtttatggcaatttaacatgtgtattcttttaattgtttcagaataggataattaggtattcgaattttgtctttaaaattcatgtggtttctatgcaaagttcttcatatcatcacaacattatttgatttaaataaaattgaaagtaatatttgtgc

SEQ ID NO: 15971 - DNA, 1757 bp, Homo sapiens
aacaagagatccggtagatttttaggggtttttgtttttgcaaatgtgcacaaagctactctccactcctgcacactggtgtgcagcctttgtgctgctctgcccagtatctgttcccagtaacatggtgaaaggaagcaccaccagcatggcccctgtgttatttatgctttgatttgaatctggagactgtgaaggcaggagtaagtgcacagcccgtgacttggctcagtgtgtgctgagagaatccgtccccggcaccatggacatgctagaggtgtgaggctgcagaacaccgctggaggacggacttgtgcctatttatgtgaaagaagatgcttggcaggcaatgcgctactcactcgtgacctttatttctcacattgtgcattttcaaggatatgtttgtgtggatatctgcttagtgttaccacatggtattctcagcatgttaccttcacactgttgtgcgatgaaactgcttttagctgaggatatgctctggaaattcctgctcagtttcactgcagccctaatatgtacatatactgcaggagctacatataaagctcttatttactgtatatttatgctttcttgtgggtaacaagtcatacctgattaatatgatgccactttgtttctagtggttcctaacccattgtctgataaatgacttttctagtttggggaattgacacttgttttgttgcctcttgaaactttttttttttcccctcattgtgggcttatttctcattgtaagggtaggataaactagtttttgtatatagagtcaaatgaccagtgtcaaagagtttgcatattgggtagaccttctccactccacatgtcccacacatatagataaagcagcaggcggcatctggcaatcagaagcccaaactgcctttgagtctaagatgtgatgactttgatgaaacacaactgaaaacatgagggactatatccagtcacttgtagccagtttcacaggccagctacagaattgtccaaacaaacattatttctgactgcaatttttttcccccaaatttaaagcaatccctggctttaaatgacaaggcacctaccaatgttcttgggtcactgaagaagctactaccatgagcctgggcatagaattttaggagataaaaggatgaatttctgtgactgccagtcagatcttaacaggtttctgttgagccagaatctgtttcagatccaagatggagaggaacactatggaaacttcccaggtgactttcagagcagttgtttcaaacacatcattgtccttttaggggaaccagtttttagaaggttgtgaattggctttttcacaaagcatgattatcttcctggctgatccaggagaaaattagaacagaaaaataatggttgtggattttgaaacaaagcaaggtaaagccttttttttttcaccttgcattggcaaaactacctcttcagtgtttttaacttttgattcaaaagcatcttaccaataaggataaatatcatatacatcgttatgaaaatattgctatgagataataagccacatatgaatgttgtatacaactttagggtttacatttaatcctgaagtgttacctcctttcatgtctatttacactattttcccatttactaagtggggagggggtctccttatatagtgcttcatcgttaataagtcaatacctgttgttcctgggatgttcttttttgtgcattaaaaacttcaaaat

SEQ ID NO: 15972 - DNA, 141 bp, Homo sapiens
agaaccataaagaaaagatgaaaaaaaaaactatcaaagaaagatgaaataataaaactattatataaagggtgacttacattttggaaacaacatattacgtataaattttgaagaattggaataaaattgattcatttt

SEQ ID NO: 15973 - DNA, 1064 bp, Homo sapiens
ttctggttgtgaatatcttgagagtctgccttggcattttataatatgaaaaaagttaatttataaaaattcacagtgcaatttatttgcctggcaagaaaagtttatttcacaaaccaacagccagtaagtgtttttgttctctatgtgtcttctatttagaagaaaagccatgtaagatgtataagaaaccacaaccagccacacctatccttctgaagagctgaaggctaattaatctgtaatggccaagaacttctacttcgatagaaaaatatttctaatgacccagtctacaaattatttcttttacacaaatatatgatgttattctttggacactaggtggtcctacacacagtaggatcaattgctaatctactttgtgaaaaagaactaagcactaatcaataataaggcttacatctaattctcaaaggtgcttatccattttcttgctaaattatccttcttgtaatttggctaaacactaaaacatggaatttttagtttgaatattttgaagtttgaggatgttgggctttccttattgtaaaaaatgttatgtttgaaattattcctgttttcaaaaatggtaattaagtcattaggataaactttctaataaaaaaaaattatgtaaatcattgtaagaccaatgtgaatttaaaccacagtgttggtgccagatattagccagggtcacaggctcttttttaaaatgaagtcaaattagttactgatataagttttatattttgtgattttgccatcatactggttatctgtgctcttgaagtctgctggttctcacaccagcagcaagaggcaaggcatgagacattttaaatatatttccagacatctaaacatctagacaggcctgagtcatgattggctctggtgtgcttccaggtaacatcttgttattgctgtttggggaaaaccaccaatagaattgcagctagacttttggggactgtgcctcgcaggctgtatcacttgctgtaggccaagcaacgagcacttccctcatggtagcaacagtccttaagcccaaagcc

SEQ ID NO: 15974 - DNA, 2089 bp, Homo sapiens
ttattctaacatattggcctctttgtactggaaaagtattcagtggtacctggaggtctggacagttatactgtaacctcttaagttttaatgtgctaaatatatcttgtatgattttttattttttaataacattggaaatatattcaagagattatgattctgtaaagctgtggaatgaagctgcagatttagagaacattggcttctgaaaaaaaaaaagagtgaagatagtactagcaagtatacttattttttaaaacaggctagaatctcatgttttatatgaaagatgtacaattcagtgtttaaaaataaaaatatttattgtgtactctgttcgttgattagttgctacaggctgtacctataagatgtacaggataatagttaaatgttgagtattgtacatatgtatttaagtggattgaataactgagtctacatggaggaggaaatgctagagaacagcaggtctaatattttttaagtttactgagagacctttattattattttcaaattaagtatagctttatgtaacttttagccagttgctctgccacagacatagacaaagagagataagatttcacattatccatcactgcataacaaaccacaccaaaactcagtggtttaaaacaaggacttttattatttttcacgattcagtgagttggctgtctctgctgtacagggcctctcagcctccagtagactagacgaatcttctttccatagtagagaaaacatcttaagagagcaagctccaatatgcaagagcttatcgatcctgtacatctatcatatttactaatgttccattggacaaagcaaatcacatggccaagtctagagtcagaatgaggggactacacaagctgacagcggatggtatgactcattgggggccattgatggaacaatcttaccacacaaggacaaattataatttatccttgtggctctctttatttttctaacaacttcaacaaaataatcctgtttatatgttatagtttcttgccacaaattttgttttttcaaacttacctttccaggtttgttttagtatgtatgtacctggaaatttttattactttttataccatttcaagatatgtatcttatataaacctcaagttggattttatattttaataaggaagttaagaccttcatttaagaggcagaagattaagataagaaatataagatagaaaagctttgttcctaacatatcttttgcctgtctgggcaagtatttgactcaactaaattttaatgaacgaatgaatgacagagaggaggaaaaaagatgaggattgcatacatgttctaaaccctttgtcagattgcagtttcctagagagtattgaggtgctaggtagaaagttaggaaaggtcctgaggactggtattgacaattggagtcctaatagtactctattcgtattaggaaagagagactagataccaaacatcacgagatcatagagatggaaaactgtatagtaaccaaaaaccaaaacagtgatatttccagaactttttagtattgttgtaaaacttcatgaaacaaaagaccatttaaatagtgaattattaaaaatctttatgatgggaaagtagatctaaattttctctaaaattttccccaaagataatatcctcttagggaacataagaaaaatgtataataaaaatgtggtgcttaattaaccatgactatgtatatattgccaattttagtaatcaatattctttgtgcatgtgatttttttgcatgattaatgttgaattgaaagctctcaggataattaatcctaaatattgtcgcatgttgacctacgttaaaagatgaataggtctagagccgtgatttcaagctattttcctgaaatgcttcagggattccataaacatttaaacaatgttctaaggtacatatacttagaacattgagatatatactacaagtgctaagaatatagtaccttgtatttttgttgatttttatcatgttttaaataggaatttataaaatatttatgatagtaataaagtagtattttatgtgttttgc

SEQ ID NO: 15975 - DNA, 730 bp, Homo sapiens
atagaagttgttgttaccgtgtgccaatgtgtcccatgtgggttgtgccaggtagagaaacaggaagtcaatcatctgtgacagtctctattctgtcgttttgctccttggtatttgatttgcactatatttagttgaagcctgttcactgtttaaaaccggaggtatcttcaaaggcatggagacctggttccagtaaatgtcccaccagtggggtatagaaagcatgctcatgaccctgccgtgtcgtctgaggtacccgttcttatcctagtggttcaggaagagaaaacgcagtttgcactttcaagacagcttctctaaggctggcatgttatctccttgctttgctttttgccgttttaaaatgtgtaattgttccagcattccaatggtcttgtgcatagcaggggactgtaaccaaaaataaacatgtatttgtgtaattggtttgaagaagtcttgaatagctctttactgtcttacttggggttgataagatttgagtgtttgcaattttttactaaatgtagctccaaagtcttaaatggcttgtttgttcttaaactgttaattgatgaaactgtgcataagtttacaatgtactaacttattttgcttattatatatagtgttttattggaaattgtaaccacacacttcagcatgatgaaaataaagattagtgtttccatttaaataaatgttttatcctcccataaaataataa

SEQ ID NO: 15976 - DNA, 1084 bp, Homo sapiens
attaattttcaatttatttacaaaagctatgtacaattaactaaaatgataaagcagtgatgtggatttctgtattctgatgatgagtctcttcagagtactgctcatcttaattaatttttgctgatatattgcttcatctactagaatatttcacatcacctataacaactgcacagtgttctgacacatttgagtgtccaaaatagccaattaacacaaccaaatacaactgggccaatataaacatgtttgaattgtcaaatataaaataatgttattgcaatacatacaaaaaagttaaagattttatgtatcactaacattagaagttttttgcaccactaattttttaaaaatggaaggtaaactgcatagcccagagaaagataagtaaatatttaagaacatattgaacaactttgctatttaaagatattatccaagtacataaattactccgttctctatcagttaaagctattgaatataatacttagctttacaagagaaaacccatatttgatgggcagagattatatccctatcttctttttcatgtaaaccactggtcacaaatgaactgatctctgtatcccattattactataagaggtgggaatcccaaaactgcttagattgcagtacatgagtctacacaaagacttcaacaattgcacatcttcattctcccaactgagtgtagtatgtggagcataaaacagcatatttcttagtatttcatgaatatcagatggtctttaaatgtctctttatggatgtattgttcacattatggctttaaaataatgaatatgtaaaagtgaggtagtgaacatcctaaatttctacactggaattactaaataatcttatttcataaaatgggaaatatatgttaaatgacatcactggatgaacttgaagatcttttacttgttaacaaaaaaatactatggacagctttctgattgttggggtaaatagcaaatgttcaaactttgcaggcattttgacattcatcataacaacacaattcctagacattgtattatataattaaagccaaaacctctaaagctaa

SEQ ID NO: 15977 - DNA, 1843 bp, Homo sapiens
cgaggcaacctttgccttcttcagaagcttggaaatcgacacacaaaacagtgcacatttagttcactgctaaacaaattaaagcacacttttcaggacttgctgggtcaccttttcctgaggaatgatacagaagagtgttttttcataaactggaccataattcttcatgtttaccatggagagttttacagaaatttggctgcactctgagagtgcttactcacagtttatttgctttttttaaaaaggagattattctaaaatataaacttatttgcatatattggaggagcatccactatcagtatttctgtgctttataaactatattagagggactgggtttaaaaaaaaagatatagggtagaaataagagctatacttacaagagtcaatagatcactgacttctctttaactgtcctgagctacatcacgcccacaaatctgtctttcataccactctatctgccattcattcttgttaaatgaggcattgttttctttatttaagattgagttatgactttaaatgtttatgagctagtttatgcctcggaagacataaggtttcccattccaatttgaatctttctatttctttagcatcatattgctcttcttcttttagactggttgtcatagtttctgcaaagggcaagttcattgtgctaccctcccaattcccccattatggagtaaccagtattattcagtgagctatggggtagtgtttcactccttgcttcaatatggttttttcctatttatttttattattttttaatcccaaatgtgatagtagcttcagtatgtttcctcacccaaaaaccatttggctggcagaaattatctagaaaaattattattttgcagttatctgagacaccaaacttaccatcctttattttacaatatttttgatcgaccaaataaaatgtcctaataatctactctatttatatctacatttccttccagctgagtcttcaaatttagcattattttgacacttttaattttcatttaacaatggattagaaaaatattttggtctagccactaaacataatgactgaaaaaaattattattataaatcaccaatataaatttattgcctacaattgtggacttatcatatttttatatatttttaaatttctgtacctttattgttaaacaccaagtttcacatacaagaggtttctttcattgtcaaattaagatatgtatttgtaagttattggtggctcatttaaactgtatcatacagtaatgccagcatttttatttaataggtcatcgtcttccttttatagctgttttacttcattgaatacgatcatgtacccagtgttaactctttgttgttgtccctttcaaatatggataactctgtgaacagtcttgactttttgtatcatgagacagagtgcctaagagaaacccttgcacctgggagcgctgcttggctctatctctacaacatttaatgaatttcttgtaaaccactttgagatacattgttttggaaattcatacaattttctcaacatggtactctactggcaggatgcagttttaaattttatgccatcagttatttattcttgtttattcaaatgactgcaataacaatgattcattcattaatgttaaggctaatacatttaagatcttgtttaaacaatgtttcttctgcaactggctactcctcttatattaatgcatacacttttgtaaagaagtatatttttatgaaaagaaactttgtaaaagtatgatgtaaattttcagtgcaatgtaaacaaaataaaaatggataattgcttttgtaaaa

SEQ ID NO: 15978 - DNA, 5527 bp, Homo sapiens
aaccttagcacttagcacaattaaatagaaataggttttcttgatgggaattcaatagcttgtaatgtcttatgaagacctattaaaaaaatacttcatagagcctgccttatccaacatgaaattcccttcttttgttattctttcttttgatgagtaggttaccaagattaaaaagtgagataaatggtcaatgagaaagaatggaagatggtaaacaatcactttttaaaacctgttaagtcaaaaccatcttggctaatatgtactggggaaataatccataagagatatcaccagactagaattaatatatttataaagaaagagaccaaaactgtctagaatttgaaagggtttacatattattatactaaagcagtactggactggccattggaccatttgttccaaaacccataaattgttgcctaaatttataatgatcatgaaaccctaggcagaggaggagaaattgaaggtccagggcaatgaaagaaaaatggcgccctctcaatttagtcttctctcattggccatgtttcagattttgacctagaaatgcgagctgtggttaggcttggttagagtgcagcaagcaacatgacagatggtggcacgctgtttttacccagccctgcctgtacatacacatgcacaccctctctgatatttttgtcctttagatgttcaaatactcagtagtccttttgtttgcggtttagattcattttgtccacacatgtacccattttaaaaaacaatgtcctcgatgcttctgtagtgatttcattttagccaggtatttctttcttgtgtgtgatgaaccagtatggatttgcttttctaagcctcctgttggttactaatctcacttggcacattataactaaaggaatcccctcaattcaaaagcatagatggatacaaatgtcagaccgtgggtttaatttgtttagaacacatggcatttcttcacaaggtaacctgctgtatttatttattttcttttggttaaatataatttccaaactttgtggtcaggcagcgtctaaggttacgttaccacagactgacagttggtatatgtaccagccaatcccttcattaaatgtatacagatttagttaagtagcattaaataggattcttagaagtatgtcctcatagaacttttaatacttaaggctttgtaaaaactatccatgaagggaaagctcctcagcataactgctcagggaaatagggctaaataactgaacattaaataattggttaaaggtgctgttagtcgagcctcaatgcttgctacaaggatgtatgtacaaggactgactttaataatttgcattatattgtcccaaccagtagtttattttttgccacggagatgtagaagatattacaagctactggatgcactgtcagattaacttatttcattaaagaagttgggagaacaaataggaaaaaaaaaacttatttttctagtaaatattaatgtattacatttcaaataatggtgcctgacatattgaataattattttctacagtgtacgtatgcaacaaagatattccatcatgcattagagtcagttctggctctgcctagctgtttacatttgcaaatgtagcaaacaaggtaatgaagcaactatttctattgcagtagatatccttttgtgtgtgtgtgtgtgcattaaagttgtaaacggtaacatgaaacaaatgaaagttcttgctataatggtatggaaaacaagaaggaaatgaaaatatttttatgcctacttaggaaaaaaagggtagcacttattcattccaagtacttttttttttttaatttttaagctcttaactcacattgttatgcttaagatgataaacatatatcctctttttattgctttgtctatgtttcatatgaaacatttcagaaattattttgataagtgttgctggaatctgcaacgctgatttttttttgcattctgtagtcgcatttgcactccatttttacattaattcgcagttgctttgtatcattgttttgtttgggttttgtttctttttcacagtgccgggtcttcgtttcttaaagttggatggcaggtagagttcaaccagttcgtgactgttgtagcgaatgaagttaaaaaaatgtctttctgatgttgtgttgtcattttcatttttgcatttttttgtttgcatattaaaaaaagagaaaagagaaagcaagagacagaaatcaggactaagtcctctgcttcagtttcattgttaacgggccttattctgatctcacctgtcgcgtagctctaatattcacataaactgaaataaagaagtggaatgaggagctttgacattcaaattatgtgatgtaatttatcttccttaggaattttgatggatgcatctcaaaatgtatagccagacttgagaggtgacaattaaagatctaaaaaagagaggagattcccccaaacaacaatatttaattttcttagtaaaaagaataacagaatgcatcgtggcaatccttaagcaacattatctatgtggactgcttaaatcagcaaaacaccagaagtttggttaacttgggcaatatgacaagtattactttttgggcaaaactactcattaagcaatttctctagtgtgtcggacacaaataggttctttatttttggcatgtatgcctttttattttcattcaattttttttttttctcagacagacatagtagtatcaactagcattggaaaatacatatcactattcttggaatatttatggtcagtctactttttagtaaaatatttttggatagcgttgacacgatagatcttattccatacttctttattattgataattttattttcattttttgctttcattattatacatattttggtggagaagaggttgggcttttttgaaagagacaaaaatttattataacactaaacactccttttttgacatattaaagcctttattccatctctcaagatatattataaaatttatttttttaatttaagatttctgaattattttatcttaaattgtgattttaaacgagctattatggtacggaactttttttaatgaggaatttcatgatgatttaggaattttctctcttggaaaaggcttcccctgtgatgaaaatgatgtgccagctaaaattgtgtgccatttaaaaactgaaaatattttaaaattatttgtctatattctaaattgagctttggatcaaactttaggccaggaccagctcatgcgttctcattcttccttttctcactctttctctcatcactcacctctgtattcattctgttgtttgggatagaaaaatcataaagagccaacccatctcagaacgttgtggattgagagagacactacatgactccaagtatatgagaaaaggacagagctctaattgataactctgtagttcaaaaggaaaagagtatgcccaattctctctacatgacatattgagattttttttaatcaacttttaagatagtgatgttctgttctaaactgttctgttttagtgaaggtagatttttataaaacaagcatggggattcttttctaaggtaatattaatgagaagggaaaaaagtatctttaacagctctttgttgaagcctgtggtagcacattatgtttataattgcacatgtgcacataatctattatgatccaatgcaaatacagctccaaaaatattaaatgtatatatattttaaaatgcctgaggaaatacatttttcttaataaactgaagagtctcagtatggctattaaaataattattagcctcctgttgtgtggctgcaaaacatcacaaagtgaccggtcttgagacctgtgaactgctgccctgtttagtaaataaaattaatgcatttctagagggggaatatctgccatccagtggtggaaatgtggagtaaagaagctggtggtctgcttctgtgctgtatgccagccttttgccttaagttgagaggaggtcaactttagctactgtctttggtttgagagccatggcaaaaaaaaaaaaagaaaaaaagatcaagtcgtctttggtgagccagtaaggtgaaagcttgctgactgtccaaggcacaagagaaaattgaggaattgaaatgcaacctgagtatcaaactaaatattctaatcaaaggtaggtactgttaggtggaattctatcagcaggcaactgcaaatgagaagaagatagaaggacgcccgtcgggactttggagggcattgttattttcccaaagaaagacggccaagggcagaggcatggattctttgcagagcacttccttttggtttttcagtactgtttcatagacagtgggctcacatgttcctgatagtgctgcagttgcttagaaagcatcccagttaattgcagtaattagaacttctggaatatgctagggcagaagtatgtcaagtatgtcacatgaagaaaatgtgaaattcaagagtaatccacacgtgagaaactagacaatgtacattcatgtgttctcttgaaaggaaagggagagctgtaagcttcactctgtcctacaccggagaaaagcaggaataactttaccgtggaaataatgtttagcttttatcagagaaaattgtccttctagagcatagagtcccaaaactcaattctggttttcccctgttttttttttttttttttttcccaacatatgaactgcagcatatcactttttctttttgtgcctcaggttcctcacctgtaaaattgaaaaatatatgtattaataatattattaataataataatggtaatgtagtacttgtttgtaaagcactttgagatccttggttgaaaggcaccataggagtgccaagtattattatgtggccaagggggttatttaaactgtcagttcccaaaggccaggaaaggttggggtcatttttcttaaagacgagctgtaaatatcaactaggcagccaatagtgttgactatgaagatgcaaaactattactaggctgataaaatcatagtttcttaatggctaccaataaggcaaatatcacaataataaacgccaaattccttagggcggactatttgacaaccacatggaaaactttgggggaggcatgaggggggaacatctcaaaatgccaatgtaaaatttaacttacagcaatattcaccagcagaaaatgtctttcatatggaatgatttcatgttgctaagaaaaagaattcaatttgtagtcctgatttgaatactagaatgttggctataatagttctgttcttacaacacatgaaattttttcgttttattttattttgttttcatagtgcatgttcatttctactcacaaacatgttcttggtgtatttcttatgcaaacaatcttcaggcagcaaagatgtctgttacatctaaacttgaataataaagttttaccaccagttacaca

SEQ ID NO: 15979 - DNA, 189 bp, Homo sapiens
gaaaaggaagtttccagaaaagaagttaacatgaactcttgaagtcacaccagggcaactcttggaagaaatatatttgcatattgaaaagcacagaggatttctttagtgtcattgccgattttggctataacagtgtctttctagccataataaaataaaacaaaatcttgactgcttgctcatttg

SEQ ID NO: 15980 - DNA, 1565 bp, Homo sapiens
ggagctagaagcattatagctagtgtttgattcactagtgcttacaaattgcccccatgtgtaggggacacagaaccctttgagaaaacttagatttttgtctgtacaaagtctttgcctttttccttcttcatttttttccagtacattaaatttgtcaatttcatctttgagggaaactgattagatgggttgtgtttgtgttctgatggagaaaacagcaccccaaggactcagaagatgattttaacagttcagaacagatgtgtgcaatattggtgcatgtaataatgttgagtggcagtcaaaagtcatgatttttatcttagttcttcattactgcattgaaaaggaaaacctgtctgagaaaatgcctgacagtttaatttaaaactatggtgtaagtctttgacaagaaaaaaaaacaaacaaacacttctttccatcagtaacactggcaatcttcctgttaaccactctccttagggatggtatctgaaacaacaatggtcaccctcttgagattcgttttaagtgtaattccataatgagcagaggtgtacgcgaaattgtgttatgactgatagccttcagctacaaaaagataggactgacctggtttaaagtgttctattttgtaaatcattccatttgagtctttctgatgaacttggctatactgaaatctgttattttagtgaggctccaaaatgagcaaagctaggcctgattagagtagagtgactattaaaaaacataactttctaggagctataaatcaaagttttaaaaagatgtttggatatatttgagtattccgatcatgaaaacagaaattgccctgcctactacaaggacagactgatgggaaattatgcacctggtcaacttagcttttaagcagacgatgctgtaaaaactaacggcttctctgatatttattgtaagttttagtactgatctccttttccagtgctgcacactcctggtttggaactttaatagcgttgcaacgaaatcctatatccagtttcctgtaatttaattgaagaaaaatacatccaaataaagactttattattaacagaccagatagcatcagaaatcatgtgactgttatgattatcagaatgtcttaactttttagggcaaagttaacactgaaagttctagcttaagtgttgaaacttttgtgggaaaaaaaaatcacttttgaaactcagacttcagtgtatacccaataatttaaaattatgtgaaatgttttaaatttgtgaactcgtaattactgttttaatgattcagtttcttcagagtggtaattgtataaaattgctattgcagctttacattcaatatgatgtgcctgtaaaccaaggagttttccccgtttgtaaaaagacattgtagataattgaatgtttgattttagaaaggtcattagtttcttgttacacattttgttagtctggtttttgttgcttatcgggtttaatattgttcttgaaaatagttgatgctatgttatgtataacttttctaataaaagttgtgttataagctgt

SEQ ID NO: 15981 - DNA, 349 bp, Homo sapiens
ggaatccggctgagtgggggaggggaagcaagaagggatgggggtcaagctgctctctcttcccagtgcagatccactcatcagcagagccagattgtgccaactatccaaaaacttagatgagcagaatgacaaaaaaaaaaaggccaatgagaactcaactcctggctcctgggactgcaccagactgctccaaactcacctcactggcttctgtgtcccaagactaggttgtgtacagtttaattatggaacattaaataattatttttgaaatgattgctatgcaggtttaaacttttttaatgatcaaaactattaaaaaccagagttctttgtttaatcaaaa

SEQ ID NO: 15982 - DNA, 1429 bp, Homo sapiens
gattacttccctttgaaaacttttttcatagctcactagggagaaggatgcacaaataagtaatggatgagcaaacagaattacctgagctaacttcaaggtggtcacgtacagttgtatggattgtgtactgcacaaccccagagaataccagtcacatcaatcagggtacgattgcactcactagagttgtataatgtgcagcctgcacaactgtacagtccagctgtagctatcttcacctgcgccaattgtgagggcgctttagcatttgagtgattcaatagttacgatgaccagtgatataagtggagtttttgttgtatttttgttttgcttttcaccggttagtgggagaaaaacattttagatatgtattactatacatgaatgtattatacacacacactttagagattgtaagaaccccatttagcttcttgaaagtggaataatttttataatagactatagtgaatctaaaactacactgttaagagtatataattcttaacaggaattataaataacttcaatatgatgagagcacttaagatctcaataactgtggaagtgacaaaataaagctagaattcgaagaaagccttaagttacactatatgtaactgatatgtctacatgagatttggatgctatcaaccttcattggctataaactttatttgttttattttagcgtccattgtacatcgttttaaatgaaaggatgataaaatatgtgtttttgagagccttgagtatttgtcattctgcagaatattgtaattgcatgcataccgatattggagaaatctgggtcagccaagtttcatgttattgcatttagattaacctagtaatagtccatttgcctagaggaaataatgtgctccctgaaagatgactattctagaaggataaatatagatttcaagtgatcgtaaaatagtattgtttgtctcatatgcattatttgcattttgtcctcagagatttccaatggtgaatttactggtatactaagtgatttaaatttgaatgtgaaatactgataggcttttaagcttcttttaagaagtagatagaaatacgaagattatgataagaaagtctgtcacagtgctatttggaaaacggaaaatttacaagcaacctagaggtccagcaatgtgaaaagaatcaagtaattctgcttaaattcataagattcagtataatgcccagttattaaaattacatctttaaagaatacatgacaacatgggaaattacgtaagtcatacaaggtgggaggaaaggtcatgtgtaaaattgtatgcataatataagcccaattttgtaaaaaccatatattcttatatgtacagaaaaaaaggactgcaagtaaatatgccaaccattttaataaaggatctctctggattgtggg

SEQ ID NO: 15983 - DNA, 817 bp, Homo sapiens
ctggaaatggccattgagctgtttcctcacaattggcgagatcccatggatgagtaaactgtttctcaggcacttgaggctttcagtgatatctttctcattaccagtgactaattttgccacagggtactaaaagaaactatgatgtggagaaaggactaacatctcctccaataaaccccaaatggttaatccaactgtcagatctggatcgttatctactgactatattttcccttattactgcttgcagtaattcaactggaaattaaaaaaaaaaaactagactccattgtgccttactaaatatgggaatgtctaacttaaatagctttgagatttcagctatgctagaggcttttattagaaagccatatttttttctgtaaaagttactaatatatctgtaacactattacagtattgctatttatattcattcagatataagatttgtacatattatcatcctataaagaaacggtatgacttaattttagaaagaaaattatattctgtttattatgacaaatgaaagagaaaatatatatttttaatggaaagtttgtagcatttttctaataggtactgccatatttttctgtgtggagtatttttataattttatctgtataagctgtaatatcattttatagaaaatgcattatttagtcaattgtttaatgttggaaaacatatgaaatataaattatctgaatattagatgctctgagaaattgaatgtaccttatttaaaagattttatggttttataactatataaatgacattattaaagttttcaaattatttttta

SEQ ID NO: 15984 - DNA, 442 bp, Homo sapiens
ctttctgagcatctgcagtacagtcttatcaactggttgtatatttttatattgtttttgtatttattaatttgaaaccaggacattaaaaatgttagtattttaatcctgtaccaaatctgacatattatgcctgaatgactccactgtttttctctaatgcttgatttaggtagccttgtgttctgagtagagcttgtaataaatactgcagcttgagtttttagtggaagcttctaaatggtgctgcagatttgatatttgcattgaggaaatattaattttccaatgcacagttgccacatttagtcctgtactgtatggaaacactgattttgtaaagttgcctttatttgctgttaactgttaactatgacagatatatttaagccttataaaccaatcttaaacataataaatcacacattcagttttttctggt

SEQ ID NO: 15985 - DNA, 1149 bp, Homo sapiens
gaaggggacaaaaagacctttcctttcatgtccagaagaatgtatgtaactaaagctttgtcctctgtgaagaattataaaagggaggggggaaaggattcgcctctcctacagaaattctgaattcatttaagttctaagcatttgatttatgttatttatacagttgggatctaattaggaaaatgtgttttgtagttctggataaactatttcatccgctgtttcctccccaaaacacacacacagagcaaactccctttcataaaagccctcatatccactggcagtccccgttcgcatcatggtctccatgtgtaccgccaaagtcaattatgtttgaaagcctttggtggatgttatggggcaaagttatgatttacacagaagcaactgccaaatctgtggtgcaaccactatctccagtgaaatattgtataacaccatttggaactactgaaaagacagtggcttttctacagtactcttccttattgcaccatttttgtattaacgtagaaactaagcatcagaatttatgaacaaagaatatgttatttttccttttgctctaaaatactgagatttggggaagcaattcttttttaaaaaaattttgaataactatcttttgataacacattcggcggttacgatgttggaatttagcagaactatcaaatccaaaattattttcaaatcaagatgtttaaattataagtttttttgttttgttttccagtaagtataaatgaaaatattcatatgtaaaatatgttttgcttaatgtggacaatttacacacccaacacatactgtttccaaaattatttctatatgacacaaagtatgatacctttaaaaaggtgagcttatatattgtttattaacctggaaatagacaatttggctctcataccataagcatttaaaaacatatgaaatattttgatttctttatatggtggtgtgtttttatttctgaattttccatgtgctttaatatttgtttaagaatattttttatatctgttcaatttttatcattccccttatcattagaaagtttgacaaaaatacttgaatcttggacctctaaatatacttttagttgtgtttaacttgtttaataaataactttttaagttg

SEQ ID NO: 15986 - DNA, 916 bp, Homo sapiens
aagaacaacggtcttttcttcaggactcaagttgctttataaagttgctggatagaagaaaaataacttgtacttttatttctgacttttagaaacctagtcttctaaggcatttttctcctcatcttaagcattttgaaactactgttatttcttaaatgttataggatgtagctttaaaattatatttgtactatgtacacagtgtaaacaaggacaaaagaattctttcctatattatgtctgaggtctctatgatttatttaaagtttggctttttatatttaaaatgtcatttctttacttaggatttgatgttctaatcattaatacacttaagttttccagagaactaaatagtaatagtttcatagaagagaactatttattcacttaaatatcatttctcaagtgagtgagttcccctctacttttagccttccacccaaactggaagcctctaggtgctatcaattatttatatccatcgtttacatccatgaaattggctgaataattactcctctgcctggcgtagacatgcgctttgggaaaaaaacgagtttataatcctataatgaagaatactggcacaggcaatgctcactcgaaaacttcaagtaatttctagttggttttggaatgcttgataaagttcctttacagctttattttcctgatttgttttggtttagatcaaagttcaaattaattttaacttagctaatgaactcatcaccaggacagttggagggggtaggccgaggttaaatggtccacgtttcaaaaatgttaatggctaatccataattaaagaaggtttaactgttactgaagtttacaagttttattgtcatgaacatgaaatacaaacacgatggcttcgaaatgtctttcaataaatgtttctgcattt

SEQ ID NO: 15987 - DNA, 259 bp, Homo sapiens
gagaataagaattgcagaaaataacagtgaagtgattgaaactttcttctgatgagtttctctaacctacaggatggagtaaaacaactgctacagttcagcacctgttttatgtgccgaatcactgtggggaaaggtcaggaaggtatagtccttcaataggaaattgtaattaaaatataattttatagaaccatttttatgtaatctgatttgaatgttatagttgataataataaaatcacttacttggttgact

SEQ ID NO: 15988 - DNA, 1071 bp, Homo sapiens
agacaggggtgacttgcctttgagaaaagaagggctgcaatgccaccagagaacgtgatgtcagacaccatctgtagtgagcagcgcaccagatgtagcgtgctacagtcagctttagctctcaagagtcgtatgtaactgtcccagactcctctgtcagtttcagcaactacaagggataccctgcgaaagtaccatgagaaatatcagagtaaaactttctagaacagtacaaggttaaagaggtgaggtgacgggaaatacacagcatagctttgaaataatgacaaccaaggacatgaccattagaacagcatgtgcagatcttaatcatcccagttcctaggcaacttgttcaccaggtacgcaagggccgaatagttgagaaatggacattcttacctactcctcctagccccctatccccagtaacagtgatcccttttcttattgtgatttatttcctaattcttgctgagttgactttcccttgtaggaaaagaaaaatatttcaaatagaaacccaccttttatttaagtatgaagcagctgttactttttaaaaaatgaattatctttcaatggtgtagaatgattccaaagtgtctccattagcatatactgagcaggaattaaataaagcatcagatactgatctgagctgtaagctggtagaatctgagccaaagtagactgcttaaattgataagctttgctaaagagttgtatgcacaaaggatgattaattctgggactatactcacaccaaggtctgctgtcttatagccaagaattacagctttatttatagagagtgaattatgggtattttttcagaaaatattgtcatctgatatacacataaaacaactcacattgttggagttaactaattatccccatttcatggttttcagtggcaacttactgacccttgtttttgcctgtgcttgtatgcatgcattttcaagcaagtaataaagcagcctcatttaattctggataatgctgggttttacatatagactgaatgctataatcaaatctattgacagtatctgcagttctttc

SEQ ID NO: 15989 - DNA, 809 bp, Homo sapiens
tcttccatgttttgacgtttgcagtcacacacaacaccttagttcctctaggggctgtacagtattgtggcatcagataatgccaccaaaggagacatatcactgctgctgggacttgaacaaagacatttatatgggtttattttcattctgccaaagtaaaacaatacatcaacaagaagaaactcagatttaacctgttatttctatgaaaatgggatgaattctttgtttatgcactttttccttactgtgcatccgcctgaaagtgttttgccctatatacctcactagccatgctttatgtgggttatcatggaagaaaaggattttggaaactcaaggaaaagttctttcaacctatacaacctaacttatggactgttttgatagatgataattttttttttttaggaaggattttctttttaactttaccaaatgaaatgccaaaggaagttttaaaggccgttggctgtgctgtattttgatataattgtactgtgtttttaaattttgtatgccaatcttaaagacaaattttgcatattctctattttacttttctgccaaaataaacctgttcttccttttttaaaataaaataagttcttaaaaaatttatacttaaaaaatcctgcccaaaatgtgaagcttggttgactgatgttcatgatagaaagaataaaatgtttctctctctctaccttttaaaattgaatagtttatttctgtgaaagaagtatttaaactttcaatattttaactttttgtttttatttcttttagaaaaggccaatatacctatc

SEQ ID NO: 15990 - DNA, 2099 bp, Homo sapiens
aggggcggcctcgggcagccgctcctctcaagccacatttcctcccagtgctgggtgcacttaacaactgcgttctggctaacactgttggacctgacccacactgaatgtagtctttcagtacgagacaaagtttcttaaatcccgaagaaaaatataagtgttccacaagtttcacgattctcattcaagtccttactgctgtgaagaacaaataccaactgtgcaaattgcaaaactgactacattttttggtgtcttctcttctcccctttccgtctgaataatgggttttagcgggtcctagtctgctggcattgagctggggctgggtcaccaaacccttcccaaaaggacccttatctctttcttgcacacatgcctctctcccacttttcccaacccccacatttgcaactagaagaggttgcccataaaattgctctgcccttgacaggttctgttatttattgacttttgccaaggcttggtcacaacaatcatattcacgtaattttccccctttggtggcagaactgtagcaatagggggagaagacaagcagcggatgaagcgttttctcagcttttggaattgcttcgacctgacatccgttgtaaccgtttgccacttcttcagatatttttataaaaaagtaccactgagtcagtgagggccacagattggtattaatgagatacgagggttgttgctgggtgtttgtttcctgagctaagtgatcaagactgtagtggagttgcagctaacatgggttaggtttaaaccatgggggatgcaacccctttgcgtttcatatgtaggcctactggctttgtgtagctggagtagttgggttgctttgtgttaggaggatccagatcatgttggctacagggagatgctctctttgagaggctcctgggcattgattccatttcaatctcattctggatatgtgttcattgagtaaaggaggagagaccctcatacgctatttaaatgtcacttttttgcctatcccccgttttttggtcatgtttcaattaattgtgaggaaggcgcagctcctctctgcacgtagatcattttttaaagctaatgtaagcacatctaagggaataacatgatttaaggttgaaatggctttagaatcatttgggtttgagggtgtgttattttgagtcatgaatgtacaagctctgtgaatcagaccagcttaaatacccacacctttttttcgtaggtgggcttttcctatcagagcttggctcataaccaaataaagttttttgaaggccatggcttttcacacagttattttattttatgacgttatctgaaagcagactgttaggagcagtattgagtggctgtcacactttgaggcaactaaaaaggcttcaaacgttttgatcagtttcttttcaggaaacattgtgctctaacagtatgactattctttcccccactcttaaacagtgtgatgtgtgttatcctaggaaatgagagttggcaaacaacttctcattttgaatagagtttgtgtgtacctctccatatttaatttatatgataaaataggtggggagagtctgaaccttaactgtcatgttttgttgttcatctgtggccacaataaagtttacttgtaaaattttagaggccattactccaattatgttgcacgtacactcattgtacaggcgtggagactcattgtatgtataagaatattctgacagtgagtgacccggagtctctggtgtaccctcttaccagtcagctgcctgcgagcagtcattttttcctaaaggtttacaagtatttagaactcttcagttcagggcaaaatgttcatgaagttattcctcttaaacatggttaggaagctgatgacgttattgattttgtctggattatgtttctggaataattttaccaaaacaagctatttgagttttgacttgacaaggcaaaacatgacagtggattctctttacaaatggaaaaaaaaaatccttattttgtataaaggacttccctttttgtaaactaatcctttttattggtaaaaattgtaaattaaaatgtgcaacttg

SEQ ID NO: 15991 - DNA, 112 bp, Homo sapiens
tgggttataaaaaacaaaaccacaaatatcttgtactgtattaattgtccttgtttacttcagacaggatccattgctaatcatggagtataaatgattatttatgttttat

SEQ ID NO: 15992 - DNA, 1864 bp, Homo sapiens
ctgcctaaaacgttgaaggagaatcaattcttcaactcaagatgtctgatttactgtgaatttgcccaatctttgatgacattgaaaacgttttggggcatacacactcaaaaagcaggatccaatacccaaaagaaatggaacttaatgttgtgccaaagttaaactactgcagttggtggaagttctgcaatgtaaatagaacactaattaaaaaacaacttgtaaaaatgcaatttaaattttaatacagtacatttttcttctaatatgatggagacattctgaatcttagactttctgagggggtttaatgaccactagagcttgtcctcatattcagtccagtttaatactgtatgtctagtaagatgggctatatattgcctctattctttgagatgtgattaagcttagaactttgaccaaaaattttacagtaaaaattgttagaaatgggtaaaaaaaaaaaaaaaaaaaaaaccctgatttattactatgtcttatttatcagaccctgcactaagattaaaagttgtgcatgggcttatacaatttcaaatgtaaaaacagcctatttatatatgttgaaacaataagattttatggtttcactggcccttaataattggatccttcattaaacacatccatgaataccactgtttctactgttacttgttccattagaagctgatttgctttttattaaactgcaggaaattaattctgaagaaggaaaagaaactgacatggtaatttggatagggtgaagctttgaaataaatactgcaccaaaaatgtgaaaaagaatcacgtagtaaatgtatacttagtgttttcttacaatcgtggaaatcagaaatgtttatacaggtgtcagatcagaatttttaagagttatctttcagtgaaattttataacagtttcagtgaatagagaaaaaattctgaactgatcataatgagttaaaagttagcttttcacttatgaatcatgggagtgttaactgttaactcttgccgtatcaggagactgaaagttcatactaatttacaaactttgtaaagactggtgctgttcattcatattgggaagaaccctttcttttgtgaccataggaccatttttcaaaatgcgctttcttcgtagaagaaatgttcagtttaattagctttggattttaacatgtttttctgaatgaccagatgtaggcttagccagtttattttctctaatttaatggataataaatattaagctcttggttaaatgtttttcagccattgaaaatgttatgaaaaagccttgaatatgcatgctgctttcatttttataaactttttattttttaactatagctttattagtaattccaaaatgctgcaatgtagctgatttcctcactcagacagctggctttgtgggtggcttttttcatactactgttaacttttttaaaaaagaagcaatgtaaagaccgtaatgcactaagctttttttttttcttttacacgtttaaaaacttcttaaagcactctgtaatataatgattaaattgctcccttttataaacattgctaatgtggtctgagttttgtttgacaataattttaatgttctcaaaatttgaaatgtcaagtattagaaatgaagcctttgaatatagttgtttcccttgcaatatgttaactctgtgtagctgtatataactattaatttccctcatctcttttataggcctgataaaactcttctctgacgtttgctagcttttaaatatatttatttgacagagcaaaagaaccctcttctggttgattgtgaccttgaatacaaaataaaagtagtgattagtagttt

SEQ ID NO: 15993 - DNA, 633 bp, Homo sapiens
tgatgtcatggtatcgagtattctttatattcagttcctatttaagtcatttttgtcatgtccgcctaattgatgtagtatgaaaccctgcatctttaaggaaaagattaaaatagtaaaataaaagtatttaaactttcctgatatttatgtacatattaagataaatgtcatgtgtaagataactgataaatattggaactttgctagaacaagaccctgtagtaatagtaataatagttgaagtttggccaactcttaataaagttattttggtaactaatgttttatggcacttaagaataattagcagcgttaaattttgtttgtattaagcacttttaattttatccttcctaaaaatagtttattgtatctgacaagaaacttacttaaccattgtgtccttcccatcttttttgtcatctttgttttcttcaaatgccctcctcccatctgccttgagattccctcgtcttcacttaaaagccagagtgcaagtcatgatttgcgggagggctcttgaaccacttctggctgcaccacaattctgtacttgagtatcacagtcattgtttttgagacaaacatttttataattctaatttgggttaataaagattttaaatattt

SEQ ID NO: 15994 - DNA, 254 bp, Homo sapiens
atcccagcacatgacaacacttcagaagggtccccctgctgactggagagctgggaatatggcatttggacacttcatttgtaaatagtgtacattttaaacattggctcgaaacttcagagataagtcatggagaggacattggaggggagaaatgcagttgctgactgggaatttaagaatgtgaacttctcactagaattggtatggaaaagcaaaatactgtaaataaactttttttctaacaatttgcc

SEQ ID NO: 15995 - DNA, 445 bp, Homo sapiens
gccaagccagggcaataggaacacagggtggaaccgcctttgtcaagagcacattccaaatcaaacttgcaaatgagactcccgcacgaaaacccttaagagtcccggattactttcttggcagcttaagtggcgcagccaggccaagctgtgtaagttaagggcagtaacgttaagatgcgtgggcagggcaccttgaactctggcttagcaagcatctaggctgcctcttcactttcttttagcatggtaactggatgttttctaaacactaatgaaatcagcagttgatgaaaaaactatgcatttgtaatggcacatttagaaggatatgcatcacacaagtaaggtacaggaaagacaaaattaaacaatttattaattttccttctgtgtgttcaatttgaaagcctcattgttaattaaagttgtggattatgcctct

SEQ ID NO: 15996 - DNA, 3042 bp, Homo sapiens
tcctcttagaatacctataaaaagatgtaaactaatgtacctcagtaattaaatatgctgtcacaacatttaggaattaagacagtaacagtatagatatgggatcaaataatttagcatgtattatggaaaacactaacttattgtggcttgatcttcttaggacatcttttttaaaaagctgtttagtatcattttgtgtatattgttgaaatgctttttcatcaatagcagtcaacattttatcctttctttttatattcataatgttatttaagtgtcattgatgtactgtattgacttggggtttgcttatttgttacttaacatgtgtacatgcatgaaagcatttttcgttgttccctgatagttacatttcaaccttgggatttttccaaattacttaagatgtttaatgtcagttaaagatttttttaccctctttttgggaacatcaattttgtactgttatgcagtaaacatttataataatataatttcagtcatttcttaactgtcacatctattgaaaatggatatagatacaggttttaagtattttaagtatatattacttattttaattttctgactttactattttaagggccagagggttaatcacaaagagcaattatgtggtctccctgctacatgaaaccgtgtatactaacaagcgtacaatttttagttgattttttttaaccttttagtttcccagttttgaataattacatggtggattctgacttttgaggggaagcaaatgattattttagagtctttgaaatggggattgtggaattagattgaactaagggatttaacatgatgcttggaaattaagagactaaagctttttttaaaaaaaggtggaaaataggaactgtcaagaaggtttatggtataaatgatgaagttgaagtgatgtttgaaagattaatgagatacaatttatattatttggtaaggtttttttttttccctccaaagatgtcatcttctcatctgaatggaataagtctgaataccccatattcatactcctaatctcattatatcttatttagtgaattttatttatgaataatttctgttgaagtgaaaactagatatttaatattttgcttttttgctacatagtctactcaaaaattacatgaggagaaatcctttttccctttgtttttcttttttcttcttttgtggtatttaaagcatattttaggttgaagttacttatttctagtcttgtacttctggcttaagtataaccatgtaagaattataaattttagttttctgaacccttaaacttttttagcatgtggtctgttacacatgctaaaaaattagtcttacttgtaacagcgtaattaaacacatcatggaggagagaaacttaaaattaaaatagtattttggcttttgaagttatttgtgttgctaaatagatgcagaggttttacagcagtttattttaaggttttatttatacataattactttgaactcttcagagtagatattttttcacaaggcagtttgtcataaattctctcatgcgcttcagaatgcataagtgccatcctttaatcatagactttgaggagagaaagcataaaaatatagcatataatctaaaaataaatatataacatgcacaaataatgtgacattcttactgaatcaaatcatgattctagaacttgagatcttaaatagaatttcggtttgtatcttccatataataaccacacacagataaccacacaaaaaatcctttgtaaaatttctgattgataggattagagtgcttaaatttttggggggggaagggtggggtaaagtgtaagtgctttcttttgtccctaacttgtgtattgatggcagtccactctgttttctaaaaatgtattttactgtggtgcttaacttcttattaattaaatcccgtatcagaaaccttgcctgtgactttagaaagggcttttgattattgttttttcttcttgctcttgaaagtaatctggtcccagggaattactggtttaactgaacatctccagaattatttaaggtgtcaaaatatataaccttcacattgaaagataattttaatttatgggcataataaaaatttgaatcattcaggtaattttcaaaaaatggagaccatttgtctttaactgaaggtatatgtttaagatcatagtctaccctagtatggtgctttgccacaaagtgatttctgaagaatggttctttttaagataatgacttcatatgatcattgtttcatgttacttgccacaaataactttaatttaggttgaaactggaactgtttgtttctcatattagctacttctctattaggagcacaagaaccatagttaaatgcaacatgagctactttagtcctgtttgtttaaatttgtgttgtccatgtattatgatttattaacttgttgatgcatgtaaattgggtgcattttgttgccatgtatgttaaatggtgaccaatgtttttacaaaggaattgaacaaaaaaagtatcttttaagaaatttggaatgtggttttgattttgaaatttgatttcttactaatctcagagggccttggtatattctgttactaaagcaaacaggattaatgaatacggatttgttacaaggtggcagcaatgtcactgagatagtgaatggaacaatttaccacctccctggaatctgcacctgagatacaacatcagcgtatgagtgaagagtgagcccatagaaaagctttagatagactcacataagtcacactgatgggtatttacagcagatatatccaagctgtttatgtaatagtctcatttactttattctttttctctagaacataaattttgaaggtaatggaagtttatcttttataccaaaagtttgtatgagccattttgaagtaaatctttctaattttagaattatattttctcgccatcttaagacagtatattaaatataatataacctttttcttagtggctaa

SEQ ID NO: 15997 - DNA, 86 bp, Homo sapiens
ttggtatatgtcttccactttccatcatgtatgtaaaatttcatagtaaaacttcctgatagtttcaataaagaaattatctgcaa

SEQ ID NO: 15998 - DNA, 2205 bp, Homo sapiens
gttcacaagaaatgcgccggtggggaatgaactgtttcattaataaaacctaatttgtcttgatccattccactctataataaaacaaaagattttgtaggcaactcggaatatagctcttttgaaagtactcgacacctttagataagaattaaaaccaacctatgtaactgacataatcttgatcttttaatttgtaaatattgacaattttctttctgcacattttaatcttagtttcccttttgatttttctgaaggtgccaaattccatttaacttttttacaagtctttgtaaaattttaaatgcataaagggggttggggcaggggaaccacgaagtagttaattttagaaaaggatttactatacttcactcttctttttttttccccacaagcttttgtagatgcattgtagtagtctagcttagaagcaaatgcaagttattttaatgtacaaactaaatgggtaagaggtaaaatcttcatttaaatatactatgttctggatgaaaagagcaggagtaacaattgatgagcaatattcagagtgaagtaaatctggaaatggtagactgtgttgggattggggggagggccatgggaggggtacatcgtcaacatagccgatcctgttacatttaagagtagcctcgtaggttgaatttcttctggtagcttcatggtaaatgcatccgaataagccatactggattgcagtgtttgtttctgtagggtgtttaaggacttgacttcctttctcccatgattcctctggactgcacacagcacccacaaccagccccatgcatgctgctgcctctgggcagtcgtagaatctcccacttcagtttctcgttgattgtactcacctttatggaatccaaatacatccaaaagggtaaggcagttttaaaaatgtgaaaacatttaaaaatgataatagcagggaattcttagattatagtaaatgccttttacttaactgtgcccagcaggctgggtgcgttaaaaagcccaagtattttgaaaaaactcgaacagatttgacaagggtagccagcttggagtctagcaacttgccaatgtgtttaccaatctgggggcttgtttttcttttcttctttcaaataaatggcagttaactggctttacagtaaacattgaagagaggaggatttgtttattgtcactgggaatctgaccactatactgtcctttttttgtattctgggtaaatgttttttggaaaagatttgtcttttctaagtggaagttaaatttgttatactgcccatcccctaaagccaacagagatttgtagatttaaagggatcacatttgaagacaatagtgtttaagaaagcaagcaagtcccttagcagtcaggtcataacagggcacatttctgaccgaaccctctcaaggcagaggaggagtttggtgggtttcatacaccctgcagattcctgttggctctaaccctcaattacctaatcttatgctttaacacataactgcattggatgtgagagtaacgtaccgtatggtcattgttctatatattaacattgaacactgctgcgattgctcaaggacattttatgttacggctttaaagcaaaggcatgattattagaaactatttaagcttttttctttgaaaaacaagctccttttacagaatataaacaacagtagtgcctgtggtttagcccaccaatcttgatgactaaaagtagctgatgcattgtgcatatgatgcttgagatggtttttgcaaaagcagaaatcgctgcaaggtaatcacaatagataaaagtggtattttaaacctttgaaataaatggatgtaactgtaccttggtacagcttttcacttgtttagtttttaaacgttagtataatctgaataaataaaatgttgccaaattcaatgtagaaagaatgtgacaacacaccttgggtagttctgcttgtgtttttgcatattgtaaaagcagtgtcacagctaaaaagaaagaaatcgtttctaacagtaaattattgtgctttagttgctagtttgtactgagagttgacctctccctgtgcagttttttgttctaaacttgtataaataacaattgtgtaatgtgtctccctcctacattgtaacaattgcttcagcctacgttataaataaagaaccactagattaaa

SEQ ID NO: 15999 - DNA, 356 bp, Homo sapiens
ctgtttttcctacttcttcaatggaaggattgtccttagatcttcccaccatcacaaatgaatttgaagatgaaaagaaactcagttgctcatacaactgcattttttctgtctattatgggaaacatcagacgttctgagtaagatatatctcatggcattagttaatataactgatattgtttaaatcatggtattacatgcaatttatatcagataaaagcagaacacatttttgtactgcctctcttaaatgctgaatgtaactgttatgtataaatccatttagttttatgttctaaagaactatttgtgcaactccagattttcagtaaaatagtattactagtacccaa

SEQ ID NO: 16000 - DNA, 4015 bp, Homo sapiens
tgggcgagctgagcgcagagctgcgaaggggaactgtttgcagtagcagccgctgctccctttctccctctcttcctccctcttttgccactgtctgggccccatctgggattcctgggccctttggaaaagagttggtgaaatgcgcagccggctgtggacgggggaggaggaaggggacagagggagcaggtaggaaacactttagttgggggtggggggcgtctccctctggccccctgtctgtcttcctctccgcggtggagcaaactgtggacttgcctggcacttaaaccttggtagatctgggtttataatcggccattcttaagcacgtggggttgggggaaagttcggagtacccattcctgccgttgcttcctatcctgggcttggaagaatcctggtagaaaggccagagtgggtttgtggagtcgccactgcgggaccagcacgaaagctgcttgtctgctttggcggagctgagctgtgtatgggatccaggaggctggggtgatttattttatgggattcctggagcgcagggctggtgaatccatgacaaggtccgggagcagcagaccaaaaccacagcagcctcctattaagtgtaacaaatagttaagcaaactcgggctacaaacaaagactttgctacctccctcctccacaacccccaagtaattagccttctggagctggctcttagctgaggctcctgctacctcctgctccacccgccccttcctaggttacaagtaaatcattgtcaagggccagccaggggaaggtttcaattaaggttctgttctgctgcctttgtttctcccctgctgttgtaggcacttacagctgcgttgttatgaaaggagggaatagccctttgtgtctttgatctaattaaacctgcttggctgtgtttatccgcagggcaggtcacagatagggttggctgtgccactccataaagtatctattgtggaagcagccaaaaagggctgctgtggcaggaattggttaatttctccttccacttcccttcctgaatagtgaagggagcccttttaaaacaaggctttggtggtaatcctgtgatttttttttctcccccatcccctcactggcccatccctctcaccctcacttttgttctgctggtgggtaaaatcttaggctgaacacatatttcaatggtaagatacttattttgctatccacacttgatgcaattgaattcaaggtgcaaagtcttgtactgaagcagtctccttgttgcttggagaacacctccttcagagccctttgttaaataagaggggcgacgttgatcatagatgccacctggttagcaccgaatctgactttggtgacagtcctaaagcacagttggtgattgtgagatctgttagcggcaggctgagcagatactacttggttttgcttggtatgagatactactgtttgcttagtatgagattttttccagcctgtctcttaaactcctgtgacatcttcaatgatatgtgccctcagttgcagcatagcttctctgctgcctattgccattgctgtctcaaaagttgagtgaattttgaggcgtctttttttttttttcctctcttgggagtcgttgtaaactactgtgtacaagtcattttgtgatatgattctgaacagttggaatagaatcatagttaagtggtacagccatggctatcgtcaggcctgttgcctggagatctctaagttaaggcaacaagacttaaagaattttctaatacacttgtttcacacatggacgttgaggccatagtctttaaaagcttggacctttgtagcacctcaacatgaaagggcattagctatgtttcctgtttttacagtgatcaccaaacagatcttgccactttgattgttaaaaatgaaccacattctagccctggtctgggactttggagggagatgaatttcttgttggaaatgtaaatctagtgtccatatttaatactctcacagctttgtgtttattctctttgctcatggaatagcagaacaagataaacatgggttaagacatttaggagaacctgctgtatctaacccagttggattttctttcatgcttaacacagtagtgaaaatagaaggtaggccgggcacagtggctcatgcctgtaatcccagcactttgggaggctgaggcaggtagatcacctgaagttaggagttcgagaccagcctggccaacatggcgaaaccctgtctctaccacaaatacagaaaattagctgggcgtggtggcaggcgcctgtaatgcctgctacttgggagcctgaggcagaagaattgcttgaagctgggaagcagaggttgcagtgagccgagatcgcaccactgcactccagcctgggcagcagagcaagtagtaataaccaccgtgtagacaagtgggagggaagaatagaatggcactgtccagctctgggctagccagatcaactcccccacccgtcttcttcctctgtcccagaatggaaaatgatgtatggtcagtcacgctgaagtatagcagcgactgtgttaagagagagcagtgactctctcttctagagaagaggttttcaataacagggcttggaaatgaactagaataggaaatagatcttttcagatgctgctttcccatgtaatacaagcgtttctacagggtaccagaggtgtgaaatatgtgacacttaagaacagtgatttttattgggaattttcttagggttattacacttaaagcaacaaccaactagtaacagctccaggaaaggggaatgaatcaactcttggttctttcctgaagacggcagtgttgtggataagtgagtttttaatgccctggcagtggctacatttgacactttagaaaaaataaacatatttaataatttttgtttctccttaggaataagactgtagaactgttttgtactgtgaattacggatgctctttgaaggaaagaaatatcgattctaatgttcttcagaagttctggcagggataagcaggacatcgactggaacgtatgctaaatgaaagcagacaaatttctattttcttacctgagcaaatattttattgaaactgcttatgtatgtcaaaggagcccacaacttcagctacacaactttttgtattgaaagaactcatactttttgtagcttttatttcacatttaatttaaagtgacttttagcactaaaatgcctagaagattttactccagacctataaggaaatgtttagtttttatgaaaaatgacaagtcgatggttaaacttctcatgtctttggtgctttggccctaatagcactggacaacaccacgaccacatggaaacatatttttggaagcaaaactttaattttatataacgtatgctatggagagctaagacaatttaaggactacttgttttctattttttttcttaataaaatggaatccactgtgttgaagactcttgatatcatgtgcttgtctaaccattttttgttttataaattagaataaaatatagttgtgataatggtcatcgaatggatttgtttggaaagctacatcttatttgtgaaatgttttttaaatcagagtaactatcaactgattcagctttttgttgttttgttcttggctataatacttgtgactcatgaagaattatgttgacaaacaggataaattccacatgcattttatttcccagtgagttgtataaactttatttttgttgaaggttgtatgttaaatcaatgttacattcttatatcacttcttgagaaggaagttccgatttgaaattgtatcatttccttcaaaatgaagggcagtgcttagttaaataaaagattgatgatatcttttaagccatttcctcttcactatgtcttattaaaataaaacctgtcaagttcttttcaaaagatgctatgagcgtttccaataaaccatctattagagttcac

SEQ ID NO: 16001 - DNA, 304 bp, Homo sapiens
gccctccctgatgggcagtcagtccagagatgctggccctcgcccagtctatgctgtgagtgtccttatgggtgcaagagatagggctgtgcctctctgcgtttccaggtggagtagagacagtaatgggtagagactttaggaaatgttttggggtggtggaatactctatatattgacaagagtttatatattgacaagagtttatatatttgtcaaaactcctcaaatagtatgttaaagacgtaagcgtttcactatgtataaattttacttcaaaataataaaaacaaatactgactct

SEQ ID NO: 16002 - DNA, 670 bp, Homo sapiens
caattctggaataagcacctgctgtagacagaagacagtattctgcaatgactgagaatgcagttttttagtgattgcaattactatctcatttattcttgcttttatttctttcctctgttcctcttccctcttttttaatcatgttcttaagacttcttttctgtgccaaaatcagtaaagttacactctgaagggatatcatcctttcaaacgggccatctaaggcagctaattatgcattgcattggggtctctactgagaaaaattctgtgacttgaactaaatatttttaaatgtggattttttttgaaactaatatttaatattgcttctcctgcatggcaaaactgcctattctgctatttaaaaaccctcaatgactttattttctactgccgcctttttcatgtgcaaccaaaatgaaaatgtttaaattaactgtgttgtacaaatggtacccaacacaaactttttttaaattagtaatacttttgtttaaagttttaagtttgcattttgactttttttgtaaggatgtatgttgtgtgtttaacctttattaactaacgttaaaagctgtgatgtgtgcgtagaatattacgtatgcatgttcatgtctaaagaatggctgttgatgataaaataaaaatcagctttcatttttct

SEQ ID NO: 16003 - DNA, 2624 bp, Homo sapiens
caaaacgcagaaccttaagattgtccacatccttcatgcaagactgctgccttcatgtaaccctgggcacagtgtgtatatagctgctgttacagagtaagaaactcatggaagggccacctcaggagggggatataatgtgtgttgtaaatatcctgtggttttctgccttcaccagtatgagggtagcctcggacccggcgcgccttactggtttgccaaagccatccttggcatctagcacttacatctctctatgctgttctacaagcaaacaaacaaaaataggagtataggaactgctggctttgcaaatagaagtggtctccagcaaccgttgaaaggcatagaattgactctgttcctaacaatgcagtattctcaattgtgttactgaaaatgcaacattagcaaagaggtgggttctgttttccaggtgaaacttttagctccatgacagaccagcctgtagttatctgtgtacacagtttacagctacaaaaacctactttggtatttattacagaaaagtgctcagttaaatgtaagtgttattccttcagcaaaatattcactgacccaaaactctttatggcattttacaatgcacacagcctcatgcaagtttagacaagtggatttatactgtcttatgagtgcccgcccctgatatattacctcattatgcaaaaataacatatctttcatgactattttgacaaaagtttaaaacacatatgaagttcaaatttcaggaaccaaggactgccagaaaatattagcctctacattacgcatgcatttagaagcttacctgaaatctgccttttataaaggaatagtatggataagtggaattgtacattttttaaacttgattgccattaaagcagaaattataaggttgcaacaatatttgtttctaatcactggctttctcaagagtatggattgacatattgtgttatgaatgcacatctctcagatgtgttgaagcatccattgcatccattttttattattttcttagttttgttcttggacaaatttaaacttttaaaagattattcaagatgaatttaaaagtcaacccttcacacagtttccctactgtatgtagaatccaggtgctgaaaccaagtgtttcttttcccatgctctttgttaaaccccaattatagataatttttccagtcttaagctctgtccaccttcaagtcaattcataaccaagtttttgaacgctgctatgaattgcactgtgaaaagcactcttccctctcagttttcttttcatcccagccatgtttatcagatccttaagaacattgtatttcagtcttttacatcagtctgaattttggaaaagaatgcaatagttgtactccacagtcagtggaactgttccctgagtccgaggctcatgtgtcattctggcactacatttgcttaaattgctattttggcaacagcacagaaaactaatatttttaagcagagaatcttggcaatgagtgagagatgttaatttcacagaagcacaactcccaacccaacccttaggaaaagccctcttccatcgttacagtgctcagtgaatattaatttagttctgcttaagtggttgctatacaaactttgaatagccacctaataaataaaccttgcatgacaaacctgcaaaatattttatcagctgttattggaaagtgattttaagcaattgcttcctcagtgtcagggcacatgtgaatttccacaccaaacagagcatgaggaaccagttgacatgctgggttgtgactggcagctttagcagcctcggtactgaagccacaccagtgtccggatggaagtctgcatctgaggttgctcagtgtcccggtcattcatttacacattttaacttgcattaaagagctgttcttttctgtggcctagactcttttcactgatctcaaaataaactggtttttttcaaaaaaaaaaaaaaaacaaaaacaaaaaaaaaacacaaaagctgcatgtctaaaattacatggagttagtgtctattctttttccccttttgcagcaacttacacagcatttttaacaccttttttttctagtttttttgttcggttttgttttccatcaggaatttgagttctctctaacccagcttactgtgggacataggaaaactcagtagaaatacctttggtgatcttgttgagtttaagtctgatcttgatcttaaactcagtaagccactatctgcaattttgtacattatatagtattttgaagatatggaaccttatgaaaaaaaaatagcaaattagttctttttcccccagaggggaaagttatgttctgcaaatagtgtgtgtcttattttactgttgaacagcaattgctatttatttttttattgcctagaacttcaacatgttgtataggaatcctgtagtgccactagttaaatgccgaattctcatctggatgttaccatcaaacatcagtacacttgtcatttcacatgtgtttaatgtgacagtttttcagtactgtatgtgttaatttctactttttttaatatttaaaattgcttttaaataaacatattctcagttgatccc

SEQ ID NO: 16004 - DNA, 89 bp, Homo sapiens
aagcattttctttctgttttttttttttgtatttcttttatatataaaataaatatactaataaaaaggtttaattttttttagaacaa

SEQ ID NO: 16005 - DNA, 252 bp, Homo sapiens
aagaggtcactggctgacccctccttgtaatgtagacagactttgtatagttcacttactcttacacccgacgcttaccagcggggacaccaatggctgcatcaaatgcatgcgtgtgcgtggtggccccacccaggcaggggcttcccacagcctcttcctccccatgtcaccacaacaaagtgcttccttttcagcatggtttgcatgactttacactatataaatggttccgctaatctcttctaggat

SEQ ID NO: 16006 - DNA, 107 bp, Homo sapiens
aacatctggctgcgttgccattggctgagacccaccaggtccagttttggttggtgtagagaccatatgcatattattcctgggataaacacagagttatttgtcaa

SEQ ID NO: 16007 - DNA, 1019 bp, Homo sapiens
caaccatttaggaatgccttcgatgaatgtcctccatctgaatatctggaaattgtccaacttgcagtctacttggaatcaagtgttttattggaagggagtaagcgagtaatggagaaaaagccattttagtttgactatgtgattttaaaatgatctcagtttttccatcaaaattataatatgctcatgaaaataatattaatttgccttccctttgcaaacaccggcagttgaaaggaaaaggacggggaatgtgatggaaaagagaccgcctggaataaatgtccccctatgattctttaaggcagtggttctcgagcttgaattttcattaggaaattctgtgaggagcttgtaaccagatttctgggtctgccacatgcacctatctcttgctgaattgctttaatagaataatgagagcaagtttgtctaactaataccaacctgacaacttgaataacaataaatgcaatttgtacataaaatataatgctgcaaaagtttgtcattcacctcagtggagtgacttgatattaggtggtaaccgtagatgatggttaatatgaaaatggacaggaaagaagcattttctgaaagttatattcttttgaaccacgttctaaaccaagtttttaatcttcttggggctcgtaattacctttcactttaatgtcacttaaagatataacacagaaaaatgccttgagggcaaaatataggcaaaacaccaatgcgctttcaaatgcatgaaaatggtgcagttgtacccttgagccttgactcaagggctgtagatgttccctttccaccccccacacttggtgcgtgttcacaaagcaaatatggcctgtaattcaaatttgttctatgtgatactctctgagtaaaaactcatacatgcagaaaattgtctttgctcgaaatgataatgccaaaatataactttatatataatttgcatttagtacatttttggttaaaaaataaactaataaataagtgaagtcatcagc

SEQ ID NO: 16008 - DNA, 1795 bp, Homo sapiens
ccaagaacagacacaatggttcatgcccaaaaggaacagaagttccaactattgcctgggatcttgcgaaaagcgaggttccctgatccctgggagcctcacgtattttagaagccaagagaagccacatggagactcaaattcgcatcttctctatccacatcatgaccaaaggaacccctccctggtgtctgatcagggctgtggcatcacgaaacattggatcatgacatgtcgggcgatgcttggaagagcccagcatgtatgtatgcacacattgtgtgtgtgggaaggacaaagccactctcacaagaaagggcaccaggactgctctccaaggaactggacctgtccagacagttacactccaaggtcattggagagaacttctgtatgggcaagcctgagagggagaggaaacaaaagctgtgtcctggcagaaggtctgggtttgcagatgggtgccctgaatggaactactttaactaatccatagggacttctggtatgctttcctctctttttaaaggaacttcgtgacactaaacattagcccaaaggacttcttagccttcaattgggagatacctttggtctgctcctgcaccaaagccatatgggtggaagtcagttggcctccctggttctgcagagggccagaagaatgagagagaggaagactgctggcagggaaatcgaggaggcgagactagaactgcaccagcttccctgatgtctgcagccatggctttgcagcgcagacagagcttctctgggatgctgggattcttgcctgtatgaatgcatcaagtattcatttattgcccgaataggcattgcattaagtcctctgtaaggtgtcaggcaagccaaaaaaaaaaaaaagatgcgtaagtcctaacccccaacagaggtgttcacagtgtagacagggaaaaaatgtataaacaaatgtgtaaaaagagaaatcagctcatggcttaggatggaattagagacaggtgagggacactcaggagctcattttccagctgctcttcagagtggaagggctggctggatcgggtaggtaagaatagctggattttttagaaaagaaatggatacagtctaaagaattaactcacccggtactttattctaagaagggtctggcatccatatgaggaaaaatgctcagctccaggaaagatggggagtccaagtggattaatgatgtcatgcataattttaagagacaagggagaaaacacaatgtatagccagagaaggagaagctcccatccaaatcctactaggaagagagtgggctgcagatgaatctgtgactcatgtttccctgtttcaaagggatcctggggaaggaggggaacatgcttgcagtatctctccctgtctgtctgctcacataagcattccgtccatctgagctcatcgtgctactggtatgtgtatgtgcagttacacagttttctgtatcatagattctagtgtgtttatacaaggagacatctgtggtttccccaaccgttccaaaaggctatttcaaaggaaccagccaacgtatgagaaatgaatgtaacactgtggacattgacttcccgcataaggcagggtgaccccctgaactccagatgtctgcacagtatcttatgtgttgttttccgttgtgacgaatgtgattggaacatttggggagcacccagagggatttctcagtgggaagcattacactttgctaaatcatgtatttattcctgattaaaacaaacctaataaatatttaacccttggc

SEQ ID NO: 16009 - DNA, 1707 bp, Homo sapiens
gcggcctgcccagctgccgcccccggactctgatctctgtagtggccccctcctccccggccccttttcgccccctgcctgccatactgcgcctaactcggtattaatccaaagcttattttgtaagagtgagctctggtggagacaaatgaggtctattacgtgggtgccctctccaaaggcggggtggcggtggaccaaaggaaggaagcaagcatctccgcatcgcatcctcttccattaaccagtggccggttgccactctcctcccctccctcagagacaccaaactgccaaaaacaagacgcgtagcagcacacacttcacaaagccaagcctaggccgccctgagcatcctggttcaaacgggtgcctggtcagaaggccagccgcccacttcccgtttcctctttaactgaggagaagctgatccagtttccggaaacaaaatccttttctcatttggggaggggggtaatagtgacatgcaggcacctcttttaaacaggcaaaacaggaagggggaaaaggtgggattcatgtcgaggctagaggcatttggaacaacaaatctacgtagttaacttgaagaaaccgatttttaaagttggtgcatctagaaagctttgaatgcagaagcaaacaagcttgatttttctagcatcctcttaatgtgcagcaaaagcaggcgacaaaatctcctggctttacagacaaaaatatttcagcaaacgttgggcatcatggtttttgaaggctttagttctgctttctgcctctcctccacagccccaacctcccacccctgatacatgagccagtgattattcttgttcagggagaagatcatttagatttgttttgcattccttagaatggagggcaacattccacagctgccctggctgtgatgagtgtccttgcaggggccggagtaggagcactggggtgggggtggaattggggttactcgatgtaagggattccttgttgttgtgttgagatccagtgcagttgtgatttctgtggatcccagcttggttccaggaattttgtgtgattggcttaaatccagttttcaatcttcgacagctgggctggaacgtgaactcagtagctgaacctgtctgacccggtcacgttcttggatcctcagaactctttgctcttgtcggggtgggggtgggaactcacgtggggagcggtggctgagaaaatgtaaggattctggaatacatattccatgggactttccttccctctcctgcttcctcttttcctgctccctaacctttcgccgaatggggcagcaccactgacgtttctgggcggccagtgcggctgccaggttcctgtactactgccttgtacttttcattttggctcaccgtggattttctcataggaagtttggtcagagtgaattgaatattgtaagtcagccactgggacccgaggatttctgggaccccgcagttgggaggaggaagtagtccagccttccaggtggcgtgagaggcaatgactcgttacctgccgcccatcaccttggaggccttccctggccttgagtagaaaagtcggggatcggggcaagagaggctgagtacggatgggaaactattgtgcacaagtctttccagaggagtttcttaatgagatatttgtatttatttccagaccaataaatttgtaactttgcagcgg

SEQ ID NO: 16010 - DNA, 862 bp, Homo sapiens
cgcagtgaagggctgaggatggacgcactgtcacacctctgcatttccagccccagcatcttgctggagccgttccatcccggagcttggaggggcagcctcaggtgtgtgcctgggcaccgctcacagcctcttgcacccagccgttggcagcatctactcagcaaggtcactaagctctgccagcgtggcagagcatgtcttggaacctgtcttgagtggggacaacgtccccccactgctgccctagagctggggagacgctgggaaaggttcaacctccacacactaaaatcattttggctcctggggcaagcttggggaatgaatgtggaagatgcctatattctgagagacaggacagtttcccaggaagatgggcagagacttgagtggcgattacctccagcacagagacgtgccaggcggtgttggcgctcggggcgagatgctgcccttctttgcacgaagcctggcctcttgcttggcgtgataaccctgtcatcttcccaaagctcatttatgagccaccagaggctcctaccccaaagattttcacagaaacttgaggccaggtgccgtggctcacacctgtaatctgaacactttgggaggccgaggcgggaggatcacttgagcccaggagttcaagaccagcctgggcaacatagtgagactcctgtctctacaaaaataaaagatttaaaaaaattagccaggcacggtggcacacacttgtagccccagctactagggaggctgaggagggaggatctcttgtgcctaggagttcgaggctgcagtgggctgtgatcacaccactgcactccagcctgggcaacagagtgagaccctgtctctg

SEQ ID NO: 16011 - DNA, 693 bp, Homo sapiens
aggacatgtggcatcggatggccacagggcggggctgccaggctctgcaggcacccagggtggggaggccacccttcctgccctacccgcagaatggtgctctcctttgccctccctgcccagcagcctgataggactctcctagtccaacttggggtgggcaaggcagtcagcatcaccagcaataccacaggaccctcaccccagcatagacacacaccccctgacccttaccatctgcttcctgaaagacttcagtgtcagctcccctacacacaccccacaccttcaccccttgcttcaagattcaaacagagactcccagtccccctcagcatcttccctgaatcacagccccagctccttgacccccatctaggtgccaaatgttcatctgcaaccgctatgcagtctggtgagagggagacagccatcacatagaaagtgaccgtacgggtttttaatcactgctgggtggggtgggggtagggggattgtcctggctttgtcgacaaagtcccacttccccgagtattaagggcccttggtatcaagtgaggtaaattcacccatcacagggtctcgccctaccatcctggaattatttcacttttaagataaatgcactatttcactgttcgcctcccattctaaggaggtgaggtggttggaataaaaacagttcctgtctga

SEQ ID NO: 16012 - DNA, 2789 bp, Homo sapiens
aaacatagagagatccttctccttacacagctgtgcacgtggcagaggcttcccaggttcctttcacagcaagagtctctaatacgttgaaaaaagagattagatggaataaattgtttcctgtgcaaatttttttagcatcagataaagtctacagaagagatatctatagagtagaagtaaagtcagaatttctcaaatgacattttaaagaataattaatagcagagataacagtaatagctcctactgaacgtggttgagaggttgaattagataatgctgtacagtgatgagaacagtatttggttcagagtaagagcatagtagatgttgatgaccactgttgtcacagttttgtgttatttattttagtctctgggagagaatgtctttgaagcacgtttattttaaaaaagtgaaatgttaattcaatatgctgttaatattcacaaaggtaaatttctttaggtctttggtggaggatcttgtaacacaatgaatgaatgcttatttttgcaaattctaatctaactcaagaggctgacacctgagagtgatttgagacttcttcaagttataaaggaagcacatctggccccaggtgtggttctgttttaattgaatgcctttttatgctacagacagcaaaaagtgaagcttcagacatttgatgtgctaccatggtttcctggcataaaaatcataacagtttgtcactaagggtaaagtcaggtgtttgggtgtggtgagtaggtcagagcatgggctttggggttggatacctggattcaaacactgtctccaacactctcacaggccctgtggccttgggcaagtcacttgtcttccctgagacctgtatgaaatagccttctgtataagatacatatttttaaaaaatctattttatatacatccacacacatatgcatatacacacatatacagatgtgtatatacatgtatttatacacgtgcttatacacacctacacacatacacttatatgcatgcgcgcgcacacacacacacatatgtacagtactctaaagaacttggcacagtccttgtcatgtaattgactgtgtaccggctatcgcatgtcatttggcacttctcattacacattctctgtccttccttttctttctgtctctctctctttgagtagcatgtgaaggcatgttgtttgtaattcttcatggaaccgctgttacatagatactgattccagtacgctattatggccgggaaaagtgaggtggcagaattcattaaagtgattttgctggaaactcatatgaagtcgggagggagtgaagccaatatgagaacaagttcttgggagaagcctttgaatatggcaataaaaactaggaagcagactgctgggttttcaccctggctccctatttaccacgtgtttagccttgggaaaagtcatgtgacctatttgcctcagtttacccatccttggatgaggatgaagtgagagaatagatgtaaatgtcttagaacagtgcctggcatggagcaagcactgtgtgtcatggactattatcattattgattctacttctccttttggaacttgctgctctggatttagagattttgaaacataggctgaaaaaatgacaagaaaagggaagttgtaattgagctttaccacctgggactgtatgtatttttccatgcccaaatcttgcctgcctgttgtgagggacccatggttcagcccagtgattttcttaccccagctgctgatgctcggcctcctggccacatccttgggcctcatgatcagtgggggagtgtcaggaatgtgcactgagatctttggccccagtcacatctgccttcattcttcttaataaaccagcatctaaagaggtttctcttttcaactttctatggttatcttccttctgagaggcttatctcttcaatgtgaacatgtaggatggcatctggggaaatacatgttgggggaaagggaaggaacagctgctgtctttatcctgtgggtcagctccttgtgcagtcttaattctcatattacttctaggagttggagtatttcctccactgggcagattaggggcctggcattacagagtcgtttggtaacttgctcatggttgtgccattggtaagggacagagacagaattcaagcccacattctcaccactgcctggggttgcccattttgttgtagttggtcattaacagcaaccacatggttcttggtaggtctcttggacacttgtccgtcatctgaaggaatgtggttgaggcagatgttgtgccgtgagggcagggattgtgctgattctttctgtgctgttaagtggcagttgtgctttatgctacgataataaaatttctgtgcaactaactgcaggagaagagcagtgtgctgaataagggggtgtgactcagttgaccttacaaaagagatatgctagcctgcttctcattagctctcacgttttcttagaagttgtaagtttaacttcaatcttttcccttactgatatttgcagttcttccagcagaaacgcttttaaaggtgaatgtgttgccgctgcttccaaagccagccagcgctggctggaggccccctcctctacgtgtcgggcattgagattttcaagtaggatctggtccctgccttcagggtgctcttggttttgtgaagggggagctaaacaataaacagtaatggcaaaatggcaacgtgagagggacagtgacgtcaatacaacaatgtactctccgccc

SEQ ID NO: 16013 - DNA, 2568 bp, Homo sapiens
tggctttgagggagcaggtctttggtaatgcttacgatcggtggagagctttagctgagacctgcttttacagacctcaccatttcagaatgaagcttcaacagcattgggggacggaggctcgggtggaacctgacatgagaggtgcttttgttttggagattcgagaaagctgagcaaatagactaaatgacaacaaactttgcttgaatttgtatagttacctggagtgtcattcaagatgttttctaggaaaaatatgagagaataaacagaatacttgggagttggtgagctccccttgctagccactactggcttactgagagattactccaatttaactagacttgccgaatatgttactagcttatagctttatcatttctgattaagtgcacacaagcatttcagaactcaggttaatctctgtgcagcagtggaacatatttgtgtaaatagaatcctcaatagattcaaatgtgtcagttgttcaagaaaatgtgatgcccatattcatattctctcctcatgttttctaaacaagggagcaaggaatgtgttacaaatcccagttctatttcataacagcagtgagcagggtgacttaaggtaaagagggataaaggtgacactattggtaaatacaagtttgttacaaagaaacatgactctagggacatactgaactatgaatagttgctccacctacttccccagaattcttctatgcagagccctgatccacaaattattttagtgattgcttacatctttgtctgtagtagggaacactgagtgagactaacctagcagaagggggcactgagatgaatgcacacacgtgtgaagctcctgctgatacacttccaaagacatgctatgttagcatttgatgcaattgcaaaaaattaaatccattaaagtggccagctgcttctcctctccatggaaggaggaaaacatctaaatggaggagtgctggattaaaacctcaggggagctctaagaagggtgctggctatctttcaatagaaatgtcttcttgccttaggaaaataaagggctaggaaaggtcactgcgttgataaaaaccaatagacgacagggacaaaagtgagatcagataggaggagaacaaccagactgaagactcaacataagctgttattggtaagtgactcaaaggggagttttgaaaattaccaggatgtttaatagtcaggtctcaaagactgagtatgttgtatgggctaaagtaagcctaaagaatcatttcgttgtatggaagagatgaatgaacctggacagtagggataagtaagacaggagcctaatcttttggagatgaaagctcctgcttctgcaaaaatcccttctgaagtgtggaaacgcatctaggaccagggttctcaatacctagaccatgactctaggtcactgatgccatggtaacaaaaccaagtaaatctaagctcatttgagaattttagatcctcttatgttaacaatgtgactttgaaaaataaaagcagaccatgggaatgagtccagatgggcagctttgcaggagtgtagacatgtggtattcttttgaagaaagagagggtcgttgagggagagttgaatgtcttgcaaaggcagagttccacacaatggatttagggtttctcagtgagtcctttctaaatgcttgttatatcctggtcataatgcatatgggttcactgagtcctctggtcactttccactggggatttttatctgagctcccgagtcagagctgggcatagactctggttcttcatgaggagtgctgtatttgctctgtaacctgggagacatttgttccctagtcgtgcagcacatggtattgtgtttcctgacctaggcaagtgcccatgctcagtacagaaccataagttggtagcagcttctcctttctggccaaatgatgggccctgtccctctgatgagtgcatttcatgttgtgtttccaattttcatcagcaatgttcgtcattccctggtcctttgaaagactgtgtagcccgcggttatggagccgggatgaatctgatgatcatcatcttctccaataaccagatgccatttttaacttcaatatgctgtctggacatagtgagaactaatggcaataaacgtccagctgcatggtgcacctcttttttataggggtgctctgctgtctttgtaaaccctctctggcctctgagcatctattataattgtgtagaaagtacatctctatattgtaaataagagtgtcgagtgttgcgtgtcatgcctcatttgaaaaggcttttttatgtctctttctattgaaatatagatatcgaatatataaatatatatacataaaatatatataaatatatattatgtaaaacagggacattctattattgattgtaaaaattataaacaaaatgcctgccaagataatggtcttgtatgtcttcattctctgcgtaatttttgtttttgtttttatgatttgttgtttcccaaaatgagttagaaataaaaatgcccaatattgagatt

SEQ ID NO: 16014 - DNA, 1017 bp, Homo sapiens
aggactctggaaagccagaagactgcagtggatttctgaaacttgaactcagagcccagtgggaagccagaggtcttgaaagacttcagccatgtgttccttttttttttctttcttttatcgtttgctttttgttttattttcttgagagacctcaaaattattaaatccaacagacgctgccggtcggtcagattattattaatattattgttgttgttaattattattattatttcatatgctgatgctttgtgagttcttttccactcctttaaagttgggaaaacttgattcgtggggcaggagattgtttcttcattcttctgacagcccccatctgacgcgtaactgcccattttaaggaaactcttggtgctacaaaaccctgaccagacacttggcaaatttacctctttcttcaaaagaaaaactttaagaaaatgagccaatgggcttcattctcagtcatgcccggagatcacccaggagaaataatacaaacaccaccactgtccagagagagtaaagaagcagaaagagaaagaatttgcaaccatgaggaatgttcccacctcccgacgggacgtgcatttggaaaacacagaatcagccctcagggtgcactccagccacctcagtgctctaagctcacagaagtgaaataatgtctgtgggttggcaatggctttgtgggatcatatgtcttggccaaagatgggaaaacctatgttgaagaggcagcccttgagtgttaatttgtcttctaaactgtgtaaggccccttcaagttcctcttgttggtttcaattatattaattataaaacaagtggatgtggtgaccatccacttgtgtttccctaatgatgggcagttggccagggcactgaccagagctgggaaatttgtatctccaaggcggctctgtctctgaaataaatggcatcaagtgcatgtgtgtatgcgacatgccctgcctgaacaggtgctcaataaatccaagtttccttctcttg

SEQ ID NO: 16015 - DNA, 114 bp, Homo sapiens
gggaactaactgcacattcaagagaggcgtccgtggatgctgggtctcactgccaaagccgaacacggcttcgggatttctgccttctcaagtggacctctgctgtgctgggcg

SEQ ID NO: 16016 - DNA, 716 bp, Homo sapiens
gcccgcctacttccgtccctctttctgcagggccagaggtgaccctgcctggcctcccacaccccctgcaatgagcaaggccttcactgcagccccatctcctcctcctcccccagacccctcccagccctctcctcctgttcctcctgtagcatctttgctgggctacgcagaagccccggacatggcagccccaccccatgccacgccccttcctacactgttccctggaccatacacaggctgaagcagaggaaatcccaaagcgggtgcccatccagcccaggtcccaggatccctgcacccatttctgtgacctggggccccagccgtgctgtgctgctcatcccagcagagggacctccctcgtccagcgacttccctttggccatagaaagaaatggtgagcatgagactgggcacagcctgagggcgtgggcagcttcccaccctccctgggccttggaatcccccaaggctggttttcttcctggagacccccatgggcaacttggcaggagagatggtgccgtaggaggtcgtggatggttgatgccaagagaggccctccacccgtggtgggcaaatgtccaggcctgggctggcagcccagggctgtttctgggtgctccctggccccagggtggcgtctggttaccatggctgtgtgtgtccatgtctgcaagcagttcttcaataaatggcctgcctccccc

SEQ ID NO: 16017 - DNA, 879 bp, Homo sapiens
catgttttagtgtttagcgattgtgtaccgagtgggattcacgagaccagctacactcagaccaacagatggccagcccttccgtgacagccagcatcgaacatgagacgtcattgattttattagattctccgttttccagaatgccttccgtcccagatttcaaacttggattttgaactgcagacctgtatgagaacccaatgtcataggaaatatggtttgctaaaatctataagctgcttattaaaacagagtcccgtgtgtcctaaaaatctcctaaaaccagtctatgaactcagggctttaaaacatttttaatttatttggtcattcaatttacttgtttttaatacatgattctctatgaaattgatgggctcaaactagctgtgaatcttctgagagtgaaagcaacacaaaacacaagtgtggttttaaagccttgaacattctgatgttgtcactaaagttgatttccaggcgatgctcgtgtgcccctggcgtggctcacccaagttcctcgactgagggccggtggccatgcagaggcgtccgcaggtgccgtgttctgccagcaccgcccttcacccggcctgaactaaggagcagtggcagaaggtgggccccgtgtgtttacagcatttccaggtccagagaggttggcagacaagtgccattttaataaaaaatgtatttaaaaaaagaaaaaagacaatatactgacagtctaatcatcagatttgtcctataggactgtgacatttattttccaaagtttttaaagaatacgggtctgtggtgataaatacagtacaatcctttttcactgttatgtctttaatgtaagagaagaatatatatatctggtttgcagta

SEQ ID NO: 16018 - DNA, 1064 bp, Homo sapiens
gcctcccctaggagcacgtcttgctaccctcttttgaagatgttctctagccttccaccagcagcgaggaattaaccctgtgtcctcagtcgccagcacttacagctccaacttttttgaatgaccatctggttgaaaaatctttctcatataagtttaaccacactttgatttgggttcattttttgttttgtttttttcaatcatgatattcagaaaaatccaggatccaaaatgtggcgtttttctaagaatgaaaattatatgtaagcttttaagcatcatgaagaacaatttatgttcacattaagatacgttctaaagggggatggccaaggggtgacatcttaattcctaaactaccttagctgcatagtggaagaggagagcatgaagcaaagaattccaggaaacccaagaggctgagaattcttttgtctaccatagaattattatccagactggaatttttgtttgttagaacacccttcagttgcaatatgctaatcccactttacaaagaatataaaagctatattttgaagacttgagttatttcagaaaaaactacagccctttttgtcttacctgccttttactttcgtgtggatatgtgaagcattgggtcgggaactagctgtagaacacaactaaaaactcatgtcttttttcacagaataatgtgccagttttttgtagcaatgttatttctcttggaagcagaaatgctttgtaccagagcacctccaaactgcattgaggagaagttccagaaccatcccctttttccatttttatataatttataaagaaagattaaagccatgttgactattttacagccactggagttaactaacccttccttgtatctgtcttcccaggagagaatgaagcaaaacaggaatttggttttcttttgatgtccagttacaccatccattctgttaattttgaaaaaatataccctccctttagtttgttgggggatataaattattctcaggaagaatataatgaactgtacagttactttgacctattaaaaaggtgttaccagtaaa

SEQ ID NO: 16019 - DNA, 358 bp, Homo sapiens
tcagcagggctctgccaggggccgaaggtcaggactcatctgggcatgccagcgtggacacccaccatgccaggggtggcaatcggttccatctcgattgattggtgatggctacccagagcaccgcattgagcgtctaaggccactgtgctgtggttgattagcaatgtctgccactggctccgatgggatgtggtggcctgaatgccggtgatttgctgttcctggggtatagcacgtccactgaaaactcacaggggtagccgggagctgctcctcactttggccagtttgtctccagaaggagttcctcagaaaaaagggcacagtggattccattgattagaaggatgagatg

SEQ ID NO: 16020 - DNA, 129 bp, Homo sapiens
cctccagccatcctcccccacccaccgccttcccctcccgtgtccacctggtcagccctgccccatccgccccccacagagcttggttgcataacgtttttccatttgaaagaaagatctagattcaac

SEQ ID NO: 16021 - DNA, 233 bp, Homo sapiens
catcggccgctgaaccgtcagctggctgtggtgtgggctctccagccccgagcacccctcctggcccggagctgggagctgatggagtccgctgcgttgtcagctgatgccgtcacttggcctgcaatggacccgagagcttcacagctgcctgctgtcctcccctgcactgaccccactcgcccctgtgtcggccccagctgagcacccgaataaaccgctgtggcttatcc

SEQ ID NO: 16022 - DNA, 809 bp, Homo sapiens
gtctcaaggttcccacaaagtctttgctgctgtgctgggcaccacccacccctcaccttgcaggctgcctgcgtgggaggcgaagtcccaggacagcccagaggggggctacagagaggagtcggctgcagcagagggcaggagccccagcttagccctgagcgccagcgcgaggaccagggcctgccactaagcccgccccgctggccgccagctgcccgtccccagagccactgcagcaggagtcgggccctgcctccctcccagcagggaaaccccgcccgctgccaggccatcctctctgccagaggctttcatgagccccaaggctggggccacagctcctacccctgcccagcagccctgagctcagctgcaggaaggacatcccagaagccatggctcctggggcgcttccaggcattctgccctgccccgacaccagaaccctggtgctggtgggccactagcgtctgcagcctaagcaggtgctggctcagggttcatcgttctgccttgtccactgggggaccagccctgcagaccactctgacaagtcttcagcccacaccctgccagccccacagattttatttttgcacataagccataaccaatcctcaaggctggcacaggctttggggaagccctggagcctgtgaagaccctggaaacctcatgaggctgtggccaacccctgccccttgccccacacagaccaggccttaaatgtcggtccaggccctgtgcaccttaccccagagacagactctttttgtaagattttgttaataaaacactgaaacttc

SEQ ID NO: 16023 - DNA, 6894 bp, Homo sapiens
tggcttctctgccctgccctggccactggccctgtttctccccacaccctggagtggcatggtcctgtgccccgaccccacctgaggcaggagggcatgtgcagacactcaagagcccttccaggagtgggtcgcccacgggtgtggctcgggtgcccaggacggtctgtgcccgaggttcctgtcaatacaggttttattttatcacttgccgtgtcatccgaaagtgaggaaatgttttggaagggtccaccctagcctagaacaagccagagccgcaccctggctggaatgggggccaggctgagccgatctggtctcgtgttcgctggctgatcattgcagtatcagagggtggagatgtcagtctgtccacgtggagagaagttgccctccaggccgacaggaggccatgcccaccgcccctggacaggcttcgtctcagaaggctctatctgctgggctggcggccatccccgtgttgggtggaccccgagcacggttgcctgaggtccgatggcccgagagctgggactcagttcttggcctgctagcggctgaacaggccgcacatctcacttcagttgtggcctcattcagcagaatgactctggaaccatcctctgttacccgcagatcctgtcccatgggctctggccccaagatgttggggggccccacggagagttgacttggtagagttcctttctgggaagaaagtaggagtggctgaccaggccctgctcatcacccggatagaggacacggaccctgtgtggtattttggcattttggctcagagtccaatgtaccatgttgcccagaatttcatacttacggcctttacatgaatacgtcttgatcagacattcagagattagtcttaggtttccacgtaagtcactgaaaacagtaaaacaggctgcttagatttctagcagtatgtgtgctcttatccccagctgttagcacgttagtaatacttttggggaggagttgtctgtcctggtcagttttcacagaggcggttgtaagaggatgtggttattttctccatgtctgtagttgctttgcggcatctccatttcacgggcaacactcactgcctgcagctgagattccagaacgccctgtgtccacagtgattagcctcgtctttcagcgagcataaaataggtgcattgtccttttcttttcttgaggcagggtctcactctgttgaccaggctggagtgaagtggtgtgatcccagctcactgcagcctcgacctccctggcttgagtgatcctcccgccccagcctcctgagtagctgggactagaggcacgcaccaccgcgcctacctttttattttttttgtagagacagggtctcactgtgttgcccaggctggtcttgaactcttggcctcaagcgatcctccttcctcatccttctaaagtgctgggattacaggtgtgagccacagcactcggcctaaataggtttttcttgctatgttattttcagtgctttgcccttgaattcttttcctctcttaaattcatatcatttggccgagtcagcacgtagtttgcattccagcgtctgctgttgattccactgaaacctctgttctcatgaaggagaggatttggctcgctgtggtttctcgtactttcacatctctgtagatacaggggcaaaagtcattgctgacagagccctatctatgtcctggaagtgtgtgtttcttgctttgaatgcatgtgtgaagattataaaagccaaatagtttttaaagatctcggtgctgaacgacagtcccagttcccatttgtgtcccattgtctttgtggtgtcacccgcactgtttgcttcattgtctggggaacttctgcacatccatgtactttgtgccatttctgggctcacgtgtcactcctaatagagcctcttaaccaagactgctggattgcagctgcttgaggcaacacaggaggttagaacatgtcccgagggctctgaaacagtaggacatcctgggtgggtggagctggggagggcatgggcaggccagctggccgagctcctggctggctctcctgagtcctctggacatggcttgtccctgtgagactgtagctcttcaggacctgagctcttcccgttcttgacctgctcttgtgctgactgtgctgggctgatgggtaggcgcttgtccccagtgagtggctgtgtcctcagggtgcccctcttccagaccaactgcagcaaggcctggagcctgactctaggtgcagcccttgtggctggaatcccttgtgccacccaggggactcgggccctgctcctcctgcagcccctcctcacctgggctcgctgctggagtgaggtttttagggagcccagagcgtactcatctctgagctgctgggcccagctgcctggtgcatacctcttgcctcggtcctgtcccccagaacgctttatggagactgccgtgtcctccgagcactttgttttcacttcctgacccgtctcagaagctcaagtggttgaatgttttagcctcagaatctttttccccaagccctctcaggtggagccccgctgtaccagacaccacagcacagctctgtgaggctgtgtctcttcactctgtttctggggctgctgaggcccctgggaagccctggagcttgccagagcagagcgagaaagtctctggtcctgtttaaatgcctccgcgttttatctgtgagcaccaggctggagccactccctgtcttctcacagtgcccctgcaagttgcagcctcagttttccagtggctcgtggggtagcaggtgctgcgtcatatggtttgggacctctgtggctgcttccagcctgctaatagaacctctttccaccactgccttcatctttggggtggcacccctgagtgctcaggcctgagggcgctcctgtgtcctcactcgggacaggcagcctccactctgggagctcccatccctcgggatgcccaggagaggccatactttcagggtggcatggtgaattcaggggttaggatgggtaggtggtctttcagccccttctgcgttggggttggtttacagaacacctgtcctgcctgtgccagcctggccttctgcgagcaccccaggcacgctgtcctggaagttgtctgtctcctgcataggagggtctagagcagaccttgccctgggcctgtctgtgcgtgacttccatatgcttcattcgtgctcagccatggctgagcatgcgatggagagcacctggaccgcccctgacgtcgcaggccactgttcttatccagtgggccaagtgattgattgctagtggtggggttgattggaagaaaggaagtcgcagcccctgcccacggcttccccagctcgctggggttggaggactgtcatcagttgtccccagttaaagtccatttggaggaggttcagggtcccagtggctggatgtgcttgtggagggacacggtttgaggcaggggtttgcagaaggtgtagactgcatccattcttgggaggctgtggcacagggcagtgacaacttgggacaaatcaagacccgtccacactgcacctcagggacctcacctcacgccccacataaatgtgcttattggggggccgggtgtggtggcttctgcctgaaatcccagtactctggaaggccacggcaggaggatcactttagttcaggagtttgaaaccagcctgggcaacatagggagaccccatctctacagaaagtaaaagaaaatgagccaggtgtggtggcatgtgcctgtaaccccagctactcaggaggccgaggcgggaggatccccaagcccaggagtttgaggctgcagtgagttatggcctctgcactccagcctgggtgacagagtgagagacctaatctctaaaaacaaaaaataacaaaatgtgctttggggtcaggtgtggagatcagggtcggggaggtcatgaggtaggtaggggtcaggatgtggacagtcatgggctggtgggtgtggcagccgtgaggggtgggtggtggcctgggaggcagggcctgggcagggcttctgcacttctgctgcttacccagccccctctgggttcgaggactctccttgacaagggctgagctctcgggcactgcgttggactcagctgcctactgggaggctggggagaatggacctgtgagaccttgtttgtcctcttccctgcccagctcttgtagaccccaggcctggctgtccgcagggccaggagctgcagccatggcagccaccagcctcccacatgagccccagctcccagccccacacgcccactcctttgcccatgtggtgtcagctctggcctccgcttccacacatggaccctcagaccttgcacatctgttgtttcccttgcagggcagtgatgatgacatgaaatgaggtggggtcactcctgtttagggatgagactggggcccagggaggggcaggtgtgaagttgctgagggcagagggagacccagggctacctgctcctaatgaccagcctcacgttctccactgctcactccctgccgttcaccagctgcatgaccttgagcagtgcactcaactgtaaacagaggtgaaaacactcctttaccaactgttttaggggccactcttgtttgaggccttgaacctcctttcagttccgtggtggtcctgagcctctgaatctgggtatggcccctgctgggtcctggtctcttaggcagcacgatggcctccctgctcaaggccctgcacccaggggcagattgtgggaggcccactggccatggctgggccctatcgcagagagcctgtcagcacggccatttccacacccaggctggctgggaagcaagctacgaggtgctcaaaggccctctatgtctgcaggtagccccgtcccacacaggcgaggatcgttgggcctccttagtagccaaaggaactgaggtccagagcagggaatgtgttgcccagtgtcagcatggtctgctctggggtcaggcgtcttgccctggtcctaagccaccccaagccaaggcatgtccctgggcccatttcctctctcgaggtcttgggttccctatttctgatgtgtgtgaaaggaaggcctgtcttctggggtgaccatgaggctcagtgggaggagctgccaggcttgagctgggacttggcacctggccagccttttttctatttcattgtaccttgatgggctgtcagttctgaagagaaaaaatacactaggaatccattcttcctccaccattctccctggcagagggaagtgactacacccctatggtgtggacatactgacgctcctccatgaagcagcaaagttctgttgtttcaggagactgtgggccttgaggatgtggtagtgacctcaccagaggagttggcaattcctaagtgctgcctggaggcctctacagagacataatgttggagaacttctgccacatggcagtgctgggtaagacccctctgtccccaccagtgcccttgaggttatgggtgttggtaggtctgtggcctccatttccatgacgatggtgttaaggactgcatgtttgtgtccccccccaaagtttatatgttgaaaccctgacccccaggagggtggtattaggaggtggggcctttgggaggtgactaggcttaggtgagatcgtgagggtggggctcgccgatgagatcgagtccttataagaaaaggaaggaactagagcgaggtcactttgtgctgtgtgagcatacaagaaaactgccatcttcaagctgggtgcagtggctcacgcctgtaatcccagcactggaaggccaaggcattaggattgcatgagtccaggagttcgagaccagcctaggcatgataagaccttattgctaaaaaaaaaaaaaggaaataaaatagaaaattgccatctgcaaatgagaaagccttcagccgacaccagactgccagtgcctttgattttggactttcagtccccagatctgtgaaaaattaatttatgttgtttaagacacctagcctgtggtattttgttatcgcaatccaaactgactgagacaggcagtaaggagagaacagaggttccagcctgcttcaggtccaggcagttctgccattgcccctaactcctcagtgccagtcatgggccaggcccctgggggacttggaatgagtaaaacatgcacctattgttaaggttcacctggtccagaaggggaggcagacccacctgcccaccatgacccggacagaggcgataaatacggagcacctcatggccagggcctggaggattcccaccataccctacccagcgccaataacagagggaccctggagttgtgtacacaagatagcagttcagtgcttgcacacatactagttgagaagggaaatcagggctaatgaaacagctcaactgtctggcagagccaggctccttctgccatgatacagtttggatgtttgtccctttctaatcttatatggaaatttgatccccagtgttgaaggtggggcctggtgggagatgttcctgttatcgggatggatccttcatgaatagcctggtgccatctttgtggtaacaagtgagttctcacttgattagtttctgtgagaactgtttgttaaaaagagcctggtggcacctccctcccttcttcctccttctcttgctatgtgatgctgctgccctttgccttccgtcatgagtggaagctccctgaagcccccaccagaagcaaatgctggcaccatgctgcttgtacagcctgcagaactgtgagccaaataaacctcttttctttataaatt

SEQ ID NO: 16024 - DNA, 198 bp, Homo sapiens
acccagggcggcagggcggaaggtgctcctcaggcacctcctctctgacggggcctggctccacctgtgatcacctccccctgcttcctgctgctgtggcacagctcactcatggggtctgaggggagagaagcacaccaggggcgccctctgccttccataccccacgcttataaaacataactaagccaagagtgg

SEQ ID NO: 16025 - DNA, 72 bp, Homo sapiens
agtccccgcccacccccatggccctatgcggcccagccccgaatgccttgaagaagtgccccctgcaccagg

SEQ ID NO: 16026 - DNA, 3970 bp, Homo sapiens
agcccccgaggcagacccactcaagaacaaagctctcgagacacactgctacaccctcgcacccagctcaccctgcctcaccctccacactccctgcgacctcctcagccatgcccagggtcaggactgtgggcaagaagacacccgacctcccccaaccaccacacgacctcacttcgaggccttgacctttcgatgctgtgtgggatcccaaaagtgtccggctttgatgggctgatcagcccctcgcctgtccagggctatttatggggaggggcccagtcaggcagggagcactgagcagatgggagctgtggccaagcccaccttctgggaagccctaggagaggcccctgcctcagtctgcccctggtgtgctggggcagggggaagacaaggaatgcccgcaggtggggtggtggggagactcttaggaggaaaggctcctccaggcctagtcacgcttcctactgaggccaggagctgccaggaccggtacgggatcagggctgtgggaggagggcctttggcaccggcccctgtgctaggaagtctgccaggcccgagttggagccaccccctgcaggggagggggcggctctgcctcagcaggccccagggcccccgaagtcacagaagctttttcgggtccagcaaggggtgtgtgtcctctcagtcaaaccccttgacgtttcccaccccctcacggggagggcaccaggcctgaagctggcaggagctagggccatgctatatttggtgggtcctggacgctgacccggccagcgctattctgggcagggagggaaaggggcagagcaggtggtcccccgagtcctggtccccaaccacagcaggacccagccgagcaaggcaaaagacgcaggactgggggatgcgcgcacaggctgggggttgggagcagcctggggccggcgcgggcctgggcgtgggaaggcggagcatgccaccctctcgtggccgtgcgggggcgggagtggggagggtggggtggggagggcggagacccagcccctcccccgcagcgggatgcgcacagtgagtgggtccctccatcaccttccacctggggatgcacccactgggagggcagggtggaagccccagctgggtgtgtggactcccagggaccccaccccaggcctgggaagcaggggtcagcccaacacgcaccaatccatccccgatgcaggtagcccagggagcacctgcccctgctgtgaatggggcattcgggggcgtgagaccttttggtgccagcggtcacgctgcacctgaggcccccacctgaccagtgctcccagctctggtgtcctgagaaacccttcaagccatcccgcatgggcaggatggtgacatatccatgtggtaggattgtcccggccccaaagtatggccctggtcaggggagcccctgctggaaattgcatctccagagctttgatgcaggacccctgggggatcagggaatgagggtctccaccccaggggtctccttgcagtgagtctatatgcaggcctgcgttctgctcctggggctggttctgagtgcccagcttcagtctcctgagaacatgaggatgggagggggcagagtcttgctgagggcacacccagttcccgctggaggaggacagtgccagtcttctgcaaagggaccttgggtgggaacgggcccggagcgggaggaacgtgactccccagagggaagatgggcatcatactgggcccagagctgggaaggagttgctgccagcacagggtgggcctggactcccctcgcccctacccccagtggttgtggctgtagccctaagcctggagagcaggaccggcccggggtgtctgggaggctgccaggtgcctcccagagctcccaagggcccccacctgcaagtgccagcctcagggcagtgcccaaatgaggccctctcagctgcagccagcgatgccttgggatgcttaccgggagggaggcggctttgggctcctaagtccttgggagaggctgggagcagtcactgcgcggcttgcgcaagcccattgtcgggttgggtggcttcctcagccagggctgggagggactccaggatcaggtcctccctgtctcgagtctcagtggggtgatggggaggagacctggccacccatggctcaggggcagctgagaacaaggacctgctggagctggaagtgctgtggtgttgaggggtggggtgggcagcttctcacacctgcctcctgcctccttctgtccacctttccaccaccctgacctgtcccagccccacacatggttctgcctggctggcctgcccttggcacctggcgtagagcacacagaaggcactcagctaatgctgggcaggcccactcatggggagtgcgtggctgtgcagcaccagggaaccggcacagcagcgccggcagaaatcacagcagtaaacttgtccgggttgtatgcatcaaggtggcgatggacgtgggtccccccactgcactgtggccctgagcactgtatagcagcccggcaatgggagccattatcttgcccctttgacagaggaggacacagaggcacagggaggtgaagtagctgccccacactagtgcctcctcgctcactcaccaccccctgcaccacagtgcagccgcttctcccaccagctggggttccttggacccccaagcctgggaagggggaggtgagtttacaaaatggaaagcttaaaaggagaaaagtggaaccagaggtttgagaagccctgagtggtagagtaaggcctccagcgctgcctctgggtgcagggcagagtggcagaggagagggggagaggcactgggcaccatgggggcccagttcccacttcggggatctctctcgcagaaccgagggtccccttcatgggggtagatgcccagggctagctgttgccactgtctgtgtggacctgagtcctggacatgcccgagtgactcaggagtggctgcttgggcgggctctgtcaccctaggatgttatacattctgggaactggacaggagtggctgcttgggcgggctctggcaccctgggatgttatacattctgggaactggacaggagtggctgcttgggtgggctctggcaccctgggatgttatacattctgggaactgcaatcagccactagagaagtcggagctacaggaagtgaccctggggtgggacctggggacatggccaggtcagcatggggacacccggctccagcaggagctctggtctgtcctggggtctttgggggcagggctgcggccctgggcaggcttcctccaggcggaggtcctggggaagtgggggagccaggccagctgccgcctcccccactatgtagcatctgattcgtcatctctcatgaaggcgatttggttcataactctgaaactctgaaaaaggtcaaaagaagcagagaggccctcggtggatatgccagcttttctgccggtgctttctcccactactctgggtggtctgctctcctcttcaaacctcagctcgcagggagggcctgaatctgccagcccctcaggatctccttccctctgggccctccccagccttaaggagcctcccagacagaagggtggacagagccacctgggcagcccgagagacacacgggggtcctccctgtggacagccctgccagcttccgcccagccctgagcttcatttgcatcttgaggagtaaggggtggtgaaatgggaatgctggtctggctcagctggtcgtgggcataagtgcccgctgaatggatggcatctctccctcctgtcttatgttctggggtccaggtgcttcccagggccatgcccctgctgctaatgcttgccctaacccttaccctaaccagcgtccagcgtcgtctcaccgagccgtaaataaatcaacagattcgcattgtc

SEQ ID NO: 16027 - DNA, 265 bp, Homo sapiens
cggctgccctcctccaggcccccggacgctcagcccccacagcccccacagcctggcgccagggctcacagctgcccctccctcgagactggccagcccacctctcccggcctctgcagccaccgtccagcaccgcttgtcctagggaagtcctgcgtggagtcttgcctcaatctgctgccgtccaagcctggggcccatcgtgcctgccgccccttcaggtcccgacctccccacaataaaatgtgattggatcgtgtggtac

SEQ ID NO: 16028 - DNA, 339 bp, Homo sapiens
ccttccccccagggaaggcccctcatgcctttccttccctttctctggggattccacacctctcttccccagccgcaacgggggtgccaggagccccaggctgagggcttccccgaaagtctgggaccaggtccaggtgggcatggaatgctgatgacttggagcaggccccacagaccccacagaggatgaagccaccccacagaggatgcagcccccagctgcatggaaggtggaggacagaagccctgtggatccccggatttcacactccttctgttttgttgccgtttatttttgtactcaaatctctacatggagataaatgatttaaaccag

SEQ ID NO: 16029 - DNA, 2014 bp, Homo sapiens
tcacgtctctgcacccagggtcccagcctggccaccagcctccctttctgcctgaccccaggccacccctcttctctcccacatgcacagcttcctgagtcacccctctgtctaaccagccccagcacaaatggaactcccgagggcctctaggaccagggtttgccaggctaagcagcaatgccagggcacagctggggaagatcttgctgaccttgtccccagccccacctggccctttctccagcaagcactgtcctctgggcagtttgcccccatccctcccagtgctggctccaggctcctcgtgtggccatacaagggtgctgtggttttgtcccttgccttcctgcctagtctcacatgtccctgttcctcttcccctggccagggcccctgcgcagactgtcagagtcattaagcgggatcccagcatctcagagtccagtcaagttccctcctgcagcctgacccctaggcagctcgagcatgccctgagctctctgaaagttgtcaccctggaatagggtcctgcagggtagaataaaaaggcccctgtggtcacttgtcctgacatccccattttcaagtgatacaactgagtctcgagggacgtgtgttccccagctgatcgtgtcagcctcatgccccaggcctcatctttcatggaccaggccttgttccaggagtgggtgttgggtcctctgcttcctgtgctgtcccctggggaaggtcccgaggatgctgtcaggagatggaagagtcatgtggggtgggaacctggggtgtggttccagaaatgtttttggcaacaggagagacaggattgggccaacaaggactcagacgagttttattgactcatttctctggttgatacggagccatgtcatgtgccacgacctggggtgggcacagggaggctgcagtttcctgcgtgaacctgccttgggcctcatctgctcctagcccagcagagagagttgacccctcctgaactggccactccccagtgctcccgtgcagggagaggaagcacccagtttgagagtgtacccagccagactgtctttatctccatggattttcatcagggcaaagatcacagcagccagctcctggtggctgatgaggatcagagcatttgttcccccatgaaaggggaaatccctatggcatcattccagtggtggtcagtagatccaggacgccctgcaggactcagcctgtacagggagatgaagtgccccaggttgggagcacacctagctagagttatttgtgttaatctattcaggatgctctaagaaaacgccatagactgggttgctgacaaacatcagaattctatttctcatggttctgaaggcttagaaggctaagatcaaggtgtcagcaggttctgtgtctggtgaggacccacctcttgtttcatagataaaaccttcttgctgtgtcctcacatggtggaaaagggcaagacagctcacagagacctcttttataaggacgccagttccattcaagagggcactgcctgcattcccttcccccctcaaaggcccggccctgctattatcgtcaccttggtgactagatttcagcctatgaattctggaggcggacacaaaaattcagattaaactactctgcttctgtttctctaaaatctacatccttctcatatacaaaatacatgcatttctccccagtagccccaaatatcaactcattttagcatcaactttaaaattgtagtccaaagtgtgatttaaatgttatctgagtcaaacatgggtaagactcaaggtacaatttatcctgagtccaactgttcttgctgcgaacctatgaaatcaaacatgttatgtgcttccaaaatacagtggttggagaggcataggataaacattcccattccagaaaggagaaacaggaaagaagaaaggagtaacaagtttcaagcaactccaaaattgaatgtgacaaacagtattaaaccttaagcctcaag

SEQ ID NO: 16030 - DNA, 1421 bp, Homo sapiens
tcttgcatctgcacccagggtcccagcctggccaccagcttccctctgcctgaccccaggccacctgtcttctctcccacgtgcacagcttcctgagtcacccctctgtccagccagctcctgcacaaatggaactccccagggcctccaggactggggcttgccaggcttgtcaaatagcaaggccagggcacagctggagacgatcttgctggcagggcctggccttgtccccagctccacctggccccttctccagcaagcagtgccctctggacagcttgactctactcccagcgctggctccaggctcctcatgaggccatgcaagggtgctgtgattttgtcccttgccttcctgcctagtctcacatgtccctgtccctctcgccctggccagggcctctgtgcagacagtgtcagagtcattaagcgggatcccagcatctcagagtccagtcaagttccctcctgcagcctgaccccaggcagctcgagcatgccctgagctctctgaaagttgtcaccctggaatacgatcctgcagggtagactaaaaaggcccctgtggtcacttatcctgacacattttcaagtgatacaactgagtctcgaggggcgtgtgttccccagctgatcatgtcagcctcatgccccaggcctcgtctttcatggaccaggtcttgttcaagcagcgagtgttgggtcctctgcttcctgagctgtcccctggagaaggtcccgaggatgctgtcaggagatggaagagtcatgtggggtgggaacctggggtgtggttccagaaatgtttttggcaacaggagagacaggattgggccaacaaggactcagatgagttttattgactcattcctctggttgatacggagccatgtcatgtgccacgacctggggtgggcacagggaggctgcagttccctacgtgaacctgccttgggcctcatctgctcctagcccagcagagagagttgacccctcctgaactggccactccccagtgctcctgtgcagggataggaagtgccccagggtgagaacgtgcccagccacatcatctttatctcctgggattttcattagggcaaagatctcagcagccagctcctggtagctgatgaggatcagagcgtttgttcccccatgaaaggggaaatacttaggtaatcattccaggtgtgttcagtagttccaggactcagggactcaggccagtcaccctgtgaccgcaggttgctttcccaccctgggcaatgcagtgcagcatgggaaaggaataagggggcaacaaggtgcacagacctcagagatggcttccttgtttatggggctctcacagatacccatccaactcctctagtcagcactagatcatgggatcctaaaataaaccttggaaaaat

SEQ ID NO: 16031 - DNA, 335 bp, Homo sapiens
tgtctcctccttcccacggggcttctgagcttgctcccctgagcctgtggctgccctctccccagcctggcgtggctggggctgggggcagccttggcccagctccgtggctgtggcctgtggctctcactcctcccccgacgtgaagcctccctgtctctccgccagctctgagtcccaggcagctggacatctccaggaaaccaggccatctgggcaggaggcctggggatgagggtggggggggacccccaggtcccggaggggaagtgaagcaacagcccagctggaagggcgtcttctgcggagaaataaagtcacttttgagtcctgag

SEQ ID NO: 16032 - DNA, 81 bp, Homo sapiens
cgacgagccgtgttgaaacttcttttgtatgtgtgtgtgtttttttcactattaaagcagtactggggaattttgtacaat

SEQ ID NO: 16033 - DNA, 401 bp, Homo sapiens
ggaccccagggaccggcctgcacctacctcagaccctcatccttggagaggaaagaggctctgtccaccactctaccccacaggagggccgcccgccaccaagcctcacctgggggccacagggacactgctctgcctgcctggccctcaaccttccatgaccagcgtgtgcgcagggcctggtcttcctcccccaagccaggcccctgtccccaccccaccaccttccagggtgccaggcagggctggcctccaggcctgtccccgactgccattggcaacagtggccctgcagcccccagccctccccacccaggttttcggcccagtgaagaggccactggccaggcctcccaggcaggtgttttatgttcagcaataaaggttctatccgtaactgg

SEQ ID NO: 16034 - DNA, 378 bp, Homo sapiens
cccccagccccggtagagccctgactgggagctagccccaagcttctctttccttacctcctccctgcagctgtgtgagccgctcccatccctggcagagtctagagccttggcccagctgtccctgagccgactcagccctgagcacaggcggctgcggagccctgcacagtaccaggttggggggaggcccaccctgtcattctgccctgtgcgcccccgccctcaccctgcccaccgctcctgtcctctgctccctgcaggtggtgctgtccgagaggctgcaggccctggtgaacagtctgtgtgcggggcagtccccctgagactcggagcggggctgactggaaacaacacgaatcactcacttttccccac

SEQ ID NO: 16035 - DNA, 64 bp, Homo sapiens
agcctgagtgtgtgtacgtgcgcgcgtgcgtgaggccctgccacgattaaagactgagaccggc

SEQ ID NO: 16036 - DNA, 1481 bp, Homo sapiens
gctgggctctggccatcctttcctgcctctgtgcccctgcctctccctgtgtcccttcccctgaggactgcggctccctccctcctgcatgagggtctcctactgctccttctccccttgcacagggaaatgcagggggcaggacttgggaggttccagcaggcgggggagccccgaccagtggggacactcctccctccccagtgagcagaaggcaccgtggtggtggctctgccccttgctgcagtgagcccaccttgctgcaacattggttctgaggggcccaagagatggcgtcttggtcatttgcccgcatggttgggcagttggttgaggccatgaacagaacttacggtaacaggcacggctggcccaatgcctggtctggagctggagcttgcctttggctttccaggtggctccgtgcagctacagccaggccggctgcctcatctcagctctagggggcacgagccatatggggtctgcacaagagaccctctcccctgcagtaaagccaggggccctggcctgatggggcccccatggggagctggagcctgccctgcagcctggagaagagggtggctgtggtgggcgtgctcatcccctgctaaggagcaggagctgctgggccaggtctgcggcagtgctggggtggcaccaggtgggcagtggtaggtggggtggcttgaggtctgggagggtggccctggccagccaggacacatgcagacccctggctttagtctggatacaggctccctctttcctcccaatcctaagctcctgacaagtggccaggtggctctgggccctcctgccccgtgcctaggtcaggggtcctggaataccccgtagctctggcaccaccacactggcctctgatggcaagacttggcccctccacctgtccctaacggacggcaggtcaggaaagccaggactcaggggagaagcaaacccccaggattgaaggctagggttctagggcctttgggtggggagggcccgggccggacagcctcagctccgtcccctgccccacaagattcacctgggcctccagtcccacgctggccccaactgctgcagctctcggcttccgcccaacagcctctggaggtgaggcgggagcatgccctcagcgaggctgggcggcgggtcctgctgtgccatctccctgtgcgcctgagcagatcaatccaccagtgcaaaacagggctaacggcacctgcaggacagcagcacgctccatccctcatgctcagctgcctctgcggccacggacttctgcccttcatctgctctctcttactctcctgagcctagcccgtccgtaagctccctcccctgcctggttcccagggcaggctgactcagttgactgcttggtccaagcctggccctggcacttgtcagggtcagcctaaggagatgggaataaagaggccagagagcaccaagtgagctcatgtttc

SEQ ID NO: 16037 - DNA, 290 bp, Homo sapiens
agctggaagacaggatcaggtgccagcggaccatcggctggcagagcccagcggccaccacccgtcaaccctgccaggagctgagggcaccacccagcaacctgggcctgcattccatccgctctgcagccccaagcatctttccagtggggcccccattcacgttggtcctcagggaaaccagggtcccgggcaggcccggcgctttgctccccacaccagccccctgcgcgtgtccactctgatcctgcatcccactccctgggagccaataaagtgcattttcacag

SEQ ID NO: 16038 - DNA, 1987 bp, Homo sapiens
gtcttctggcctggcaacccaggccagggtgcccgcatcgctgccccggtcatccagaagccccgcggaacagagagccctgctcatctgcttgagcagcggctgtcaggccacggccgcttggggcttggctgagtgcgccagacctcggctccactggaggctcacctggcagctgccgtctctgccccctggcctccccaacgctggggctgcacccctcgccaccagtgcctttctcccctcagcaccttcatctctgcaccgtcagccttgcgtggcgcagcgtctggctccgccatctctttgtgcctcagtcccccccgccccctttatttttttgagacctagggctggagtgcagttgagcggtctgggctcactgcaacctctgcctcccgggttccagcgattctcctgcctcagcctcctgagtagctgggattacagatgtatgctaccacgcccaggtagtttttgtatttttagtagagacagggtttcactatgttggccaggctggtctccaactcctggcctcaaatgatcagcccgcttcagcctcccaaagtggggggattacaggcgtgagccttgcaccccgctaagtcccctatcctcttgcaagggtctcgcctctgtgcctcaattcctcattctctgggcccttctcctcctcagggcctcctgttctcagggcctcccccctccccgctccctccctctctcaaggtctcctccttccctcccccccccccccccccgtctcccccctcccccgcctgggcttcacttcctttcctacttggattctcctgctcgctgcctcccagcatcttttttggaggcccgtctcttgctgtggggaagactgggctggctgcgggcagtttgcaaggggtgggtggggcaggggggggggagctggaccagaagatgccccttggagtggcaaggaagctggacagggcaggcctctggggacgggacacagggaagcccgaaggggcgccttggccaggtctgccatctcctccagcgaggctctggccagcactgggtgagagtggggagggggcattggcctttgcagcacagtaaaacatggtccagacaacctgtggccccggcctcatgagcaccccctgcacaggcccggcccaagccaggcgctagaagggctggttgtggagtgcttatccttgacaggtatggggccaggtgagggcaggggacaaggtgcagctgaggccgagcccaactaggtcctgggcacccctgcaggtgggagtggtccttgtcctcctggtatccagcagacacccccctctccccaccagccccattctcaggtcctttcctctttgtcaccaacaccaagaatctgtccagggttcttggcttatcttttatctcttttcactcctagagaggaattgcaattgactcagaatgacacattttggcaccacgtgtgtagaaagcccccactgttagatgatagcctcgtgaaattcatgtttctgtattctcctatttcttttcaaaaactaattttttttttagtgtaataaatcctaagagggaactgatttaagaaacaaggccgccaaacaaaggcagcagttccgactccagcagctgggaaaggaaggaaagtgaccccactttcactcctgcacagcccactggttaccaaaaccaccgtgcaagtcgggatgacagcagggacttctggccaggtgggaaaggtgcctggaagcgggatgcgcctgtgcgtctcttggccatgatgttcttgtgggcatgttattcttggtgctgcctggggtgttgctgagcggacaggctctccagctggagtccatggagaggccagaggctggcggccctgcctgggccttcggagcctcctgcctgcaccctccacctcttctaaaccatgatgtggcacattttggtgttaataaaacacaacacacaaagt

SEQ ID NO: 16039 - DNA, 243 bp, Homo sapiens
cagccaccagaggtaccagaggtggcacaggcaggggaggtggggggcagggcagaatccacaggaatgacccagctcctcccccacaggttacaaggggagagtggcccttccctcacaagtccgacatctccaggcccccactgaactccggggacctctactgactgcttgctgggacagtcaccagggttggggggaagggccacaaaatgaaaccattaaagacccttaagagccagc

SEQ ID NO: 16040 - DNA, 243 bp, Homo sapiens
aggagcaggcacctcccccagacttggggtgggggccctgccagctccagcaccacccttgccccaagtcttttaacctgggtgttagcattttaaagagaccccacaggagttctggcctgtgactaactaactgccccaccccagccgagacctcggcgagactgtaactagtgatgtttgtacaaccaaagactctattttgtggtttaaggagaataaagttgactacattttacctcc

SEQ ID NO: 16041 - DNA, 141 bp, Homo sapiens
cagtggtccctctccccggacttgcacttgttccttgtttcctctgggttttatagtgatacagtggtgtccccggggccaggcgcgctctgcccagcccagcctacagtgcggataaaggtgcggatgctgctggccctg

SEQ ID NO: 16042 - DNA, 1914 bp, Homo sapiens
cccggagccccagccccaggggaccatgccggggtgctgcctgggcaggccatgttggggagactccagcaccgtggggctgccctcctccatgcgcctgggagcacaaaggccccggtagtgaaggaaccccccgtctcctgagagtggggctgaccctgccttgggcgccgaggggttggggggtgggtgtgggggagccgttaggcctcccaggtccttaggatcagggttgcccccagaaccccttcccatatcctccattctccgccctgagttcctacccaggctgcctggccggggccactgcctcctcagcatgcaggaggctgccctgtagggaaccccagctctggggcttgggggtgagggtcagccctggacagacctctgcccagggaactgctccatggggtctgggagagcagccatcccctgctggcaccatagacccacacaaggagcctgcacagcaagccagcggtgacacacctgcaggtgtcaggcatggcactgggcacaacagggacctggcaggagaaacagaccacagagaggtctggagttgaggctgttgtcagcaaagcccctggtcccacacagctctgccctagagccacctctttgaccctttacccaccctgagaccagaacttgcagcccctctgcagatctcctctggccactgcagcccctccaatgggctttttctctcatgcattccctggcctggaggcgtcagggaccccacatcctccctgctcctcagactcacagcccctccatgttacctcccgcacctcctccctggggcagctgctccctgggcctctgaggatgtcagctcctggctccctgcctctctcccactccactcctggctcagtcttagagatttctatgccctcatggattctacccctgccttcctggcctcttgattcttggcttgcctctcctccaattccaaacttagtgaaatggccttaagcattttaaactgtatgtatacattagcgcattcatgcctttctaaacgcatttcaaatgtcaaccaggaaggcacaccactgtattagttttatactgccgctgtaaaatttaccacaaacttagtgacttaacacaaatttattgcaattctgtaggctggaagtctgactatgggtctcactggactagaatcaaggctggcaggctgccttccttcctggaggttctaggggagactctgtctcctgctccttcaggctgctggcagaatccacatcctttcggtggcagggccaaggtccccactttcttgctgactgtaaactaaggccacttccagcttgtagaggctgcctacattccttggctcttggccccctcctccatcttcagagctagcaggttcagtctgtgtcacgaaccatttctctggttccctgcagacaggaaaggttgtccctaaggactcatgagattaggttgggcccagccagataatacatgataatctccctcctcaaggtttttaatattaaacacatctgcaggacacattttgccatgtaaactaacattcactggttccagggattaaggaatgaacctcttttgttggggaagggtggcattctgctgaccacagcactccaaccaaaagccaaaaaccaaagcaagacttactaacgcatatcaaataaattaaaggtacaaaatcgtgaatctcagttatcttaaatattccaatactatttacaaaattattcaaattctcacgccttccaactcaaaattagcaatctaaagtaatttccatatcctagatggaaaccctcatgctaaactgtctgattatgcatggttctaaatggtttcagtggcaaatacataacattgtactactgattaaactgaacttaaaag

SEQ ID NO: 16043 - DNA, 247 bp, Homo sapiens
ctgggcttcctccgtgcagttttctgcaactctggagaagtggaggcatacttgtgtgtctgggttgttttttttttgtttttttttttgtcattctttaattttgttgttttacccattcgttatctgtggaaaacgttttaagttgtcatgtgacagaaacttttcctttgtccatcgaggtgtttcataagttttttggtgtgttttctgggtcgtctatgtgtcatatggttttacttttctc

SEQ ID NO: 16044 - DNA, 1024 bp, Homo sapiens
ggctgcctgcgcccaccccgctctgcatgcggcccagcccggctcccaccgaggcgcgggggccgttttcaacgcttaaaggtgtcttcctcccaagtggtgcctaaagtttaaccaaaaagaccagactaatatattaatatatatctgctgtccagacagcctgtatcttgggggacagggctggcccagccctgctggccgcctcaccccctcgggtctcctcactcccttctacctgccactcacacagccaggtgccttggagggtcccaagctgggccccagcccaccctcctgtcttcccagggtagcccgcctgccagtcctagctgcacagggcagctgggcccaaccctgtctgtagagggccctggtgtttctagcactggcctgcacggtgggccttgctggggacggggggccccagtcagcctctctcccagtctacccagagaagccccttccccatgggaagacgaggccctcgggcccagcccccacagtgctgtctgatctgtgctttccagctcaccccccacactcactcctgagacccctggcctccggcgtcagcctccagcctctgttcccctagtaagtgccttccatgtcggcctctaaccccaggccccgaggacccagacccagtggggaggcggacgttccagccggcatggctgggaactgcagacctgtcctcctggtgggtccaggggcccctccagcttgtggagccccacactggggtgccgcctgcccgtctctctcccatggagccccagccccctttgggcccagggacaccagccaggctctgtgctgaccctcctgttgcacccagccctggtctcagcagcgaccacccctgcctccaccctctgagctttgcatgttccactaaccccgggcgggtggcaggtggaggtgtcaggctgctggcgcctctgcaagggcagaacactaacctgaccgtgggcggggccttgcggtatccgcccccaataaaagcaattccaacctt

SEQ ID NO: 16045 - DNA, 324 bp, Homo sapiens
ccgaaggggccaccctctggcctcctgcttcccaggctcccagctccgcacaggctgatgctccccgcccccaactgtggccgcctgagctgtccccggggacgcccctgcctccctctgcgggctccagaaggcggtgtgggggatggcggtcagcagcggccgaggggggccgggctaggtcccagcctgggccgaccccaccaccaggggtcagcagagcccaggaggcgacaccgcccgcccgccgctcccagacctcgcccgagtcggctctgttgtttgaataaacgtgaacgtgaacccaggcggaagggacccggg

SEQ ID NO: 16046 - DNA, 59 bp, Homo sapiens
ggatcccgcaataaagatgccttaagtctcccggttctggggacgcagctacggcgcct

SEQ ID NO: 16047 - DNA, 64 bp, Homo sapiens
ctgttctgcctgcctggggctggggtggtcgtgctgaagtcaacagagcctttaccctgtgctg

SEQ ID NO: 16048 - DNA, 263 bp, Homo sapiens
gctgcacctgagggcctggcttctcactgccacctcacacccgctgccagagcccacctctcctcctaggcctcgagtgctggggatgggcctggctgcacagcatcctcctctggtcccagggaggcctctctgcccctatggggctctgtcctgcacccctcagggatggcgacagcaggccagacacagtctgatgccagctgggagtcttgctgaccctgccccgggtccgagggtgtcaataaagtgctgtccagtga

SEQ ID NO: 16049 - DNA, 2393 bp, Homo sapiens
ggcggcggggcctcccccagccaggtcggctctcagcaatacggccccccagggaagtcttcgctggcgtccgggtggaggggccggagggcgggcccctcctcacagcaatagggggaggggggcccggtcccaccccgccccgcccgccaggggccttgccggccccttcaagcaatagggtcccgaggggagacccaccccgagccccctcccctcccctccagggtgcccccggctttctcccagcaatagggtcgacgagacctagaaccgaacctcatctccgagttgggtctctgaagacgggggtgaggtgaggtagggagcgccctccttctcccgcctctgcgcccctggatcgcgtcgcagggactcaggtcttccccaccccttcccaagccttctagcgcagggcctgcggcccagacgtccagggagccggcccctccccggcagcaggccggggcggagcaggagcgggcgggcctgcagggacgcccctgcctagcagccttcgcggaactcccggcagtgttagacgcgttgtgggtcggggagaggggcggacggcggcaccccctccctcgggttgcttctggggcctcagtcggagccgccctcctaccctcgcctcgcatcctctgccaaatccgaattcttccagcccagcttcccgggctctgtcctccatatcgaataataatgacacatatcgaatcgcatggacttatccgacctcctcagaccccgcttccgccctgccccgggcccccacccccccccccgtaccccaggcattcgtgttggaggacggattcccggggccggcaggcaggcctgggcgctgccctctacacacctctgtcttcgctttgcgggtaaagccccctgggggggttgcggacgcgtcgggtttctttttctgtatttgtacgttttatttatgaacggattgcactcgggtcagggagggggcgctgaacccccatcttgcccgccgacgccgggggcctgggatgtccgggattactttccacgccccgaggcccgcccctagctgggagcctctagggagcctcaggccccgcctctccgaggcaggcccctcccctgagacccaggccccgcccctgagacccaggccccgcccccactcggttgccaactttcgcccgtctatgccaaagcctcggcggcgaccccgccccaagggcccgccccattggccgccgcctttgtgacgtcactgcatgcagccccacccctcctcccgatcctacccggggctgcccgctccccctccctcttaggtagtccgaagccgactatagagcaataatgcgcactgcatgcgaagctgccgccgcctctagagttactgagaatcaggtatcccctcgccctacccaccccataggcccctagatcagggacgctgcgcggggccggccgcgcagactttctccccacccctccccgacccccacggcagagcccggcggctgtaatggttccatgggcgggggtggggtggttgcccccaagacccctccttcaggcattaatcattcactgaccgttcattgagcacctactatgtgccaggccaattgctgagtccgccaggagcgcagccacctgctgggaggtgtgtttgcaggacaggggtccaaccggcttgggtgggccagggaagaacggcagatgcagagagaccaggtccctaggttcacatgccccctacactcctccccacctcaaccagtccctgctgggcacaactgggctctacctttgagttaggccttttgactccagctgagggggacagatccagggctcctgggcccccacacaggtggccacttctctgatcctctggccaacacacatctgccatgtccagccaggggcagagccatggctggagaagaaggtgccagctgtagcctatggtgtggccagcctcacccccagcagcaagcgtggctgcccccacaaggatgacccaccgctctgcacagcagtgcccacatccaaacaccctacacaaccaggtgtggtgcctgcacagctcccaagctggggcctgcccacctgtgccgcatgcacacgcacacacaggcgcccccacctcaccccaccccatactcctgtctacctacctaaggagaaagctggagggctgtgggcccgtcagggtctcctgcttccccctacaccccgccgccgtggaaagccatgggccccctcccgcccccataactaagcagcacaataaccgacttagcgaattcaggtagaaggaacgtttaggtagcacctattttgtactgattctacaagtagggcccgaggtgcgggggccctcgggtgggggctgcggccgc

SEQ ID NO: 16050 - DNA, 34 bp, Homo sapiens
tgctgagggcctcaataaagtttgtgtttatgcc

SEQ ID NO: 16051 - DNA, 99 bp, Homo sapiens
gcagccacagacctgggacacctcagccagcttgcccaccctccacctttgcccaatttcagatatttgagcattttgttaaaataaaacatttttagg

SEQ ID NO: 16052 - DNA, 86 bp, Homo sapiens
ccccgtggatgccgtcaccaccagcacacggaactacctcccaccccctttttgtacaaaacacaaggaaaaacattttttgcttg

SEQ ID NO: 16053 - DNA, 123 bp, Homo sapiens
taccctgccctagtcccccacctttgacttaagatcccacacctcacaaacctacagcccagaaaccagaagcccctatagaggccccagtcccaactccagtaaagacactcttgtccttgg

SEQ ID NO: 16054 - DNA, 270 bp, Homo sapiens
gctggacgactcacaggtgcgtcagatgctgttcgacctggagtcagcctacaacgccttcaaccgcttcctgcatgcctgagcccggggcactagcccttgcacagaagggcagagtctgaggcgatggctcctggtcccctgtccgccacacaggccgtggtcatccacacaactcactgtctgcagctgcctgtctggtgtctgtctttggtgtcagaactttgggggccgggcccctccccacaataaagatgctctccgaccttc

SEQ ID NO: 16055 - DNA, 335 bp, Homo sapiens
ccctggcgctgcctttccccaccctcaccgaagcccctaataaatgaagctgctggccgggcgcggtggctcacgcctgtaatcccaacactttgggaggcccaggcgggcggatcacgaggtcaggagatcgagaccatcctggctaacatggtgaaaccccgtctctactaaaaataccaaaaattagccgggcgtggtggtggaagcctgtagtcccagctactccggaggctgaggcaggagaatggcgtgaacccgggaggcggagcttgcagtgagccgagatcgcaccactgcactccagcctgggcgacagaccgagactccgtctc

SEQ ID NO: 16056 - DNA, 300 bp, Homo sapiens
cagttggatacagccaggcagggtttctgccctgccgaacactttccctcccacctgcctgctcctggcgccttctccctaggggtagactcttctgcctactgaagtgggtttgctgcacattgactggtcaggggcagagtctgggtgctgtcctttggccacgtgtggggacttgtctagaccagaatgaaagggacagggtcccagacacgtttgggggtcctgattctgggctggacacggttgtggatccagagaagaggcctagtctccaataaatcttaggaattttgcagg

SEQ ID NO: 16057 - DNA, 112 bp, Homo sapiens
ggctcttaagacaggggccactcctccctcccgctcccacccccaccttgttgacagggagccaaggcgaggcggctgtctgcgaccacagcagcctcgaaacaccaggcag

SEQ ID NO: 16058 - DNA, 142 bp, Homo sapiens
ctgcactgcattgggggatgtcgggtagagctggggttgtcagaggctagggcagtgactgaggacctgggcaaaacctgccacagggtgtgggaacgaggaggctccaaaatgcagaataaaaaatgctcactttgttttt

SEQ ID NO: 16059 - DNA, 86 bp, Homo sapiens
ggccgcgggcgcgcggatgacgtgggcgccggagattggccggtgcggcctcgcgcatgctccgtcagtaaaggtggaagccgcgc

SEQ ID NO: 16060 - DNA, 1123 bp, Homo sapiens
gcggggccaagggaaaggcgggaggccgcgggcgcctctcgccccgctcccccgggactccacgccccggaaagcccgcgccacccgcgctcgcggcagcctagtgcgcctgcgcgctcggccccgcccccacccggcgctgtccttggtgctgccgcggcccggccctcccggacaccccgctccccacggcgcgcgccccccgcgcacccgactccggcgccctccggattggcctgcgctcgagacgtcaggcactggcggcgggcgcggggctctggtgcgcgtgcgcgagcgtcccccgccccctcccagcccggcgactgctcgggcccggccgccacctgcacggcgggggagccgctcgccgcgggagcgtcaggtgaggggacgcccgacccaaggtcaccaggcgtgggggcgctgggggatcggggaccatcccggctctgaccctggtgcgctccgagaagggcgtgggtcctggagggggatggggaacgcggaggccacgccctccctgagcccggccgaaaatcaaccggctctcgtgggtagcagaggaggccgtgggggatacaggcaccaggtcgcagcgctgcagaggtgcgcaagggccgcccaaagaccagcttgggcctcgcactgcgcccgaggcagacacagggcgttccatcctcttccctccccgctcccgcacagaggggcgcccaggaggcagtgacagtcgtcgcggaatcctgcgtgtgacaccccgcccctgcccagcggattagggagttgtcctctggtaaaaggatttctgggctgcttccagcttggggccctcatccctgccctggcaggcctttctacaccgatctgcatctagtggggggtcagcgtgagcagcagcgccgtgagttctgaggccaagaaccttctccacttgagaagccttcctgggggaggctgagtgggccaggcctggagccacgtaccaacactttatacccaggggaatggatcccaagggcccagataacgcccccaacttcttggggttcacacgcgtcctgagacatctgggaactgcctctgcctgggccaaagctattccattaaaactttattgctgtgctta

SEQ ID NO: 16061 - DNA, 1243 bp, Homo sapiens
cgggggcgcccggggacaggagggatgtcctgccgcccccagccaggccgaactccgcactcgctctcccggcagaggggccagaatcgcccggcccagccctggagccccctccactcccccaggcccctggccccggcgctccccacgtcttctgcctggtctgagggtgcagccagggcacagcagcggcggggagggcgcctctggccccccacctcacggccagttcccgcgggcaccgcctcgccctccgctggccgcgggtcagctccgagaaagtgccttctgtgtcctggagccgagcgacgctgcctccttggggccgggctgcctccctgtggctcctgcgcgccctggcctgggccttgcccagccgccccggtctctccttccctttctcctgtcctcgtcctggcctgcagctcttcccagccccgagagagcttcccgacctgtccccgcctcctctccctccctcggcccgtggtccccagctggtgactgctcaggagtttgggggctccaggacagtgggcccggggcctggcaggctctcggtgggtggggtgggggcccccaaaccaaagtcctctggggtagggagcagggctgggcaggcattctgggggcagggtgggggaggggcgagagtatttttttcttcgtgtaactgtaaatccagaatctatcctgcatcgcagcccaccgtgtatagagatataaatagagggaaagatataagaactaaatttgctaatgacatagttttaacctaaatgctatttatctctgagccgtccccgtcctccgtgcagagcaagttgaggtcattccttcttttcttctccgatcttttttcttggcttctgaccaaaaaccaagctctaccccatccccatcccagacctgcaggagacgagcgagcgggaaggcgccgggcccgggactgtccgttctcggggccagagctgctgggggaccgagtttgtacattttccattttggaattttgagttccaattgttgtaaaacttaatttctccccagtttttatatatatattttttagagttccgtttttatttattaaaaacaaaagccccagccctgccgaggcctgggcggcgtcctcagtcgggtggtcccggggcctttgcggtcccgcccggctgagacgctcgccccgacgcatggacccgagaggcgacgacacgagtgaataaagtgcacatggaccctg

SEQ ID NO: 16062 - DNA, 143 bp, Homo sapiens
cagtggcgcggtgtccgagggcagagtccagctgagcacttcctgcatgcgcccccggcacctgactctgccctttatgtattatccacacgatgttttcacagagtgaaaggacgtttctcattaaacaaacctcttttctt

SEQ ID NO: 16063 - DNA, 498 bp, Homo sapiens
cccctcacttgaccagtcccattcagatccggcttggacaggcacctgagatggtgccaaagtgcagctgactcttcccacgacagccctgcccttcccatgaggcaggctcttcagtgagtgtttgaacgtaattatgtagttttctgtttaattgaaaaagagagctatgcctttttttctttttggaagtaaagcagctaaaaacatgtttctataggtgagtgttggacctcacaccctccccttccctgtacatttgtctttggtgctggacgtggccatgtgaggccaggttgaggccctttgtagacaacatacagttgctcagcctggccccatgtagccaggtgcttttgtagatcttgtgttttaggttgggcattttcactcttctgccttaaatccctgaccccatggagctgacattctagtgcggctgaggggaggggaaacattgtaaaataaatcataaaaattaactggaatagctcatca

SEQ ID NO: 16064 - DNA, 364 bp, Homo sapiens
cccatggctgacacaagaatccattctcacagaaactgcatgtggaaccacaagcagccttcagcccaagagaagtctctgttaactctataggaagcttttctttggcgattcagtgtcacaaaataactccagaaagaagcacttagcgtgctgttcctgtggaaaaacttcagagactacctgttttattttcctcaacatcttgaagttatgttggagagtaatcatacaattgtagagaattttggtaaaaaacagccataattctttaacattagtttatttgaactaagggaatttaaggcataagaaccattatcccaataaaatcttacattccaaataaagttctttttctaag

SEQ ID NO: 16065 - DNA, 682 bp, Homo sapiens
gggaatgcataccttaccacataacacgtagtgcagaaactcatgtgacataggctgggaacttgtttcccttatccatttcctttttcattaggctcatagtttgtggaaaaatcccaatatgccgtttattcaggtggggctgaccatgggatatggtgctaatgatatatattacatttactcttggcccttaaaaaaaaaaaagaaaaaccctcacagtcttcctggttcataatatggatttggaggttatttctgcagcaaacttgggtcctgtgtgttcaaaaccataaagcacaaggtcaaggaagctagagtctgaaaaacgaacaattcacttccaggtcttcatcagggttttgtttttgttgctttaaagcaagagttaagtttatagtctgttaagctcttacaaatttggcttattagttaaatggacgtagtttagcttaaactttatgttagagtgagatgaaaccctatgaatataatcagttttagaaaaactaatcagtttattgtgcatcagagacgtcacatgaagaagaaaacttgttgacatccaggatgatcaggagccttcattaaaacagaaattttagggaaaaccacaaaaaccttcgtaaagtgaattgcattaaacatcaattataataaaatttcatattttgaataaatg

SEQ ID NO: 16066 - DNA, 1033 bp, Homo sapiens
gaaaagccatcttcattcgtggagactgtggccctgcaaccctggagaaggacttgctggtacttaaaaaatgggacatttgccacccaggactgactgtacactccctgatcagccagcactctggaagctttgggatcccaggaaccatggaattattcccaaatggactctgaccagatttttgccatactggggggtggcgggatggaggatgggtactcaggcatgactgcgtatttattaaagtgtgtttttccacaatgtaccaaacaaggcataagcagcttctcctgctgactggccaatcactgcccatctgagagatgatttcctctggcccatatttgaatttattggagtaactcaaattgcctgaggaaaaatggaaaaattatccaccagtcgattcaaactgaatttcactctttataggaaggcagggcaaacttgtaggagtacgaaacattttcaataaatctacaaagggaagccttactacaattccaaaaatcatcatggttggaaatttgggaggagattatttgtgaacttgttacccttttggtaatggtggactaattgctgtatagttatttttgttttattattactgttacattaatttaacatgcatttatagaagaatacattcaaagcactgatgtaggagatacacggtacttggagcagtcagccagaaatcacagatactgctttcacttaaatggaaacaattctccgataatgctttgctttttttcttatgtcactcttgtgtactatctatttttctcctctctgggaccaagtttctttttataaagcaataatatctctgttttcatttcagaacattgtgctgtctgtcagcatatgtatatcagctacaaaatatattcaactttgacttcttttgacaaaggactttaggaaaaagaggaacaaagacattatttgagaattaaattatatatttttaatatgactgtgaccttgactgataataaagatgtaataagaattgcaagct

SEQ ID NO: 16067 - DNA, 868 bp, Homo sapiens
ttgtatgcaaatagccctttatttacatgccactattaagctgctaattgttcctgttggggtgacagatactgaatgtatacgtattgtgcctgagctcaccagcaaacagaagcatcaagcccaggggtaaaggctgaagctttcacagtgcagagactgctagcctgggcacacacacctcctttctggccgtcttctgtgtagggcacactttaacccagtctctgttgctgttgagtctctgctccgttttgtacagtcacagggaattctgatctgaaggggcaccttctgttcactcccacaaagtggtgtctggttctcactgagacgttttaagatttttccacaaatatttatatgtactaaatgtggaaccattagaaagttcttccaaaatctcattccagcatagttttggatttttcttttgtcttattttaaaataaggaagtcgagatgactttgatcattggtaacttgggcctgggccagacaaagtataaaacttacaaaagaatattctcatttggtcttaactaggtagatgtaatatatgactttttataaaaagggtatctatatgaacttgacacagtattttcagcttttgtattccatactaaagccatgaagaactacacgtaacatcatcatttgtattaattgcacaactccaatgctaaaggttggattgtgttagaggaatcggctctgtatttgcctctagagaaacacagtgttctctttgtatttatggattcctttttaccgtgtcacatttactttggtcctctatgtatttaaatgtttgaagtgccttagactcttgccatattttcaaaataaaattccattaagctct

SEQ ID NO: 16068 - DNA, 949 bp, Homo sapiens
gcagtgcctgctgccgatggcggttcacttggagtaacaggcttattccactttccatggggtttgttaatattttgcattgactcatactatcttaactgttgagaacgtatttggtttatattccttagagtttagtccagaggctgtaacacatttgtaatactttagggtccgtgactaccatctgcatggtttaagtgctttactcacggagtttaaataatagtgttcatttttttaatgacactggtttcatgtagttttcaagaaataaaagaattcattcaagtgaagccatttgtgtgcctctaaatgagtcatctaattagatgttacttttagttttaaaatgaaatcttaggtgccttaggggttttttttttttttaagtattttttaaaaacctgcaaagatataaatttagccaagttacctgacgggtgagaagaaaagagcaggcaaaattagtgatttttttagaagtctgctaaatggatatattgtgtgtgttgctgttggaaatagccccaccccatcctcccaatccaaaacgtaactgaaatataatcagaaacattaaagcctgtaaaaaaaaattgctgcgtttttggtaaagggtgtaatttgtaaacagtgcaatttaaagtgaccttagtgatgcagagttcctgagtggtgtttgtagaatgagtttatcatacattctttctactactggaaaaaaatggatgcagtctggactgttgtaaccttaggttgtaatctgatttggaaataagtacatctttaaaagttgctacagatttgagttcatgattttgttaaaaattgctatggagtactttgttatataacagaagccatcctgaaatgaaactagtctaaaaaaattcattgttctacttagttgcagctgtacctgaaataaaaatgttattgatgactg

SEQ ID NO: 16069 - DNA, 727 bp, Homo sapiens
agtggtgctggatgggtggtggccaggtgacattttctgtgcgttttgaccctgaggcatctgaggagaggccacatcttgtgtatgccctttccttctgtttgacaaagtgactgtgcttgattctatacattagcaataaaaacataacttatttaacttcttgcacttcactggaaaatgccaaatagctctgttctgtggctttagtgctgaatgtttattgtaaaagagagtctaatgttaagaatagtcttgggaaggctgggtccgtggaagatttatttggggatgtaaagctgaaggtcagccttgcacctaaacccaacctggaatgttaaatgaaataatatacttgaatgcaattttgtaaaagtggattcctcaggatatgtgaaacctaaaggaagtggttctgttgcaaatggactataaacagggacattatattcttacactaaaaatccttgcattttaaagagagatgcacttaagaatagagtgaactgctcatatgcttatttaagcttggacagttttcagagacaaaccccattaagaattactcttttcacatggctgaatcgaaacatgtgtaatgtcaatgtaaaaccaatcacagctgtgaactgcatgaaatgtattgtgaaacgaacacaagattaagctttgtcaggttaatgtagcatgttaaggactctagaaaaaaataaactaaggagacgag

SEQ ID NO: 16070 - DNA, 1778 bp, Homo sapiens
aaaataaaagtgacatcagctctaggtatagatatattttttaataatgaaaaaagatgacatggataataataaaacattgattgatacaagataaatagtcttgtctcttaatgcgtagggggcctgggaagaatattaaaattttaatcaataaagtatgtctgttgaagcaagcaagcaaacaaatccataacaaccacaacaagcaacaagaacaagaacaacaacaagaagaagttgcagtatggatatctttcaccctcccaggaaactctttcaaacctaatctgtacttttgcatctgtataaaaatatcagtgagatggaactgtaaataattgttctgctgatctgtagtgttgctgttaccttctgggtttccacatttttattccgtagatgttaatctctttcatgtgcaatctttgcttcttgtaggctatcgccccattccagcggagacttatgtaggagggaccttccctctacctcccccagttagtgacaggatgaggaaaagaagagcctttgctgataaagagttggagaacattatgctggagagagaatataaagaaagggagatgttggaaacttctcaagctgctgctctgtttctgcccaaccgcatggtgcctggacctgactacaattcctacaaaagtgcctacagccccagcccagtggaaccaccaagcaaggacttctgtaattttttgcccacctgccttgatttaaccatgcagtattcagggtctgggaatatggaactaatttcttctaatgtcagcgtggccacaacttatagacagtatcccttgtcctcaagatttttagtttggcccaagtgtggccccattagcgacaccctcctctaccagcaatgcctgctaaatgccaccacctcagttcaagccctgaagcctggggccagctgggacttgaagggagcacgagtccaggatggactcagtgcagagcaggacatgatgccatcgaaattggaaggttccctggtgctgcctcacactcctgagatccagaccacgagaagtgaccttcagggtcatcaggctgtcccagagaggtccgcgttctccccaccccgacggaatttctctcccattgttgacacggactccctggcagctcaagggcatgtcttaacgaagatcagcaaagaaaacaccaggcaccctctgccacttagacataatccattccactcattattccagcaaacacttactgacaaatcgggtcctgagttgaaaacaccatttgtcaaagaggcctttgaagagacccctaagaaacacagagagtgtttagttaaggacaaccagaagtacacatttacaatagatagatgtgcaaaagacctttttgtagccaaacaagttggaacaaaactctcggtgaatgaaccactgtcattttctgttgagtctattcttaagaggccttcatctgccatcactcgtgtctctcagtgaaaggctgcttaaacagaaagctggattttctgcagtcttagagcattatagccatttgctactttttttaaaagttaagatgtttgtgtaaagaaatttctaatgtaaagatgatgattttgaaaaattttatatattcctaatatgcatgtactttttcttatcacatatatttaaacttacagatggaaattgcccaatgtgcaaattgttaagtaccacactttacacagcatttcaaaaagcaataaaattgacactgtcttctcaaagacccaa

SEQ ID NO: 16071 - DNA, 882 bp, Homo sapiens
tcagtatggacctttttccttggtagaactgaattccttcctcccctgtctcatttctacccagtgagttcatttgtcatataggcactgggttgtttctatatcatcatcgtctataaactagctttaggatagtgccagacaaacatatgatatcatggtgtaaaaaacacacacatacacaaatatttgtaacatattgtgaccaaatgggcctcaaagattcagattgaaacaaacaaaaagcttttgatggaaaatatgtgggtggatagtatatttctatgggtgggtctaatttggtaacggtttgattgtgcctggttttatcacctgttcagatgagaagatttttgtcttttgtagcactgataaccaggagaagccattaaaagccactggttattttatttttcatcaggcaattttcgaggtttttatttgttcggtattgtttttttacactgtggtacatataagcaactttaataggtgataaatgtacagtagttagatttcacctgcatatacatttttccattttatgctctatgatctgaacaaaagctttttgaattgtataagatttatgtctactgtaaacattgcttaatttttttgctcttgatttaaaaaaaagttttgttgaaagcgctattgaatattgcaatctatatagtgtattggatggcttcttttgtcaccctgatctcctatgttaccaatgtgtatcgtctccttctccctaaagtgtacttaatctttgctttctttgcacaatgtctttggttgcaagtcataagcctgaggcaaataaaattccagtaatttcgaagaatgtggtgttggtgctttcctaataaagaaataatttagcttgac

SEQ ID NO: 16072 - DNA, 617 bp, Homo sapiens
cttctgtgacaaatgttgacctttgaggtctaaacaaataatacccccgtcggaatggtaaccgagccagcagctgaagtctctttttcttcctctcggctggaagaacatcaagatacctttgcgtggatcaagcttgtgtacttgaccgtttttatattacttttgtaaatattcttgtccacattctacttcagctttggatgtggttaccgagtatctgtaacccttgaatttctagacagtattgccacctctggccaaatatgcactttccctagaaagccatattccagcagtgaaacttgtgctatagtgtataccacctgtacatacattgtataggccatctgtaaatatcccagagaacaatcactattcttaagcactttgaaaatatttctatgtaaattattgtaaactttttcaatggttgggacaatggcaataggacaaaacgggttactaagatgaaattgccaaaaaaatttataaactaattttgtacgtatgaatgatatctttgacctcaatggaggtttgcaaagactgagtgttcaaactactgtacattttttttcaagtgctaaaaaattaaaccaagcagcttaaccatg

SEQ ID NO: 16073 - DNA, 30 bp, Homo sapiens
tattttataggacatgtggctggtagattc

SEQ ID NO: 16074 - DNA, 1911 bp, Homo sapiens
ggcccctggctgcagatgactggaaacaaggaaggacatttccgtgagagtcatctcaaacactgcttaaggaaaagagaaacactaatggccaagtgtacatttgatttgatatacagacctccagattattttctatatttggattcacagcctttgcgctctgggttttgggatttgggtgtggggtaagttgaagggaaatcaatttaaaggaaagttctattatctgggttttagaaattctataagagacaaagtttggaagtacataaagtaataactgttagaattaggtaatggatatgaaagagaaaatgctttctcatgcatagacaagtgttttgggtttttaaaaaaaatattctgtcattggttacaaatttttactcaggctttctattggcatggatttcctttgacctctcacttttttataaattataatgcatctaaaccacctgtccccagttaatgtgccaaaatgtcaatttttaacttatctccagccaatttcaaagaaaacagaccagcatagttctgcaataacagttttaagatgggcatagggtttggaagaaagggagaaggattcttttttcaatgtactgtattgggacgctggtaactgttaacccagtgttcagcatagagctatatatatatatatatgtatatatttattattttcatataatttgccagacagagatcagaattgaaccgtcaatgtgaaataaagagttctccttgtacttgaataataaccacgattccaacccaggtctgctttggggcttatcagaactcctttctaaggagcactagaatgagaaatcatgttgttcgatcgtttcacatctgtatatcagctctaaagcagagatgtattatggtgatactccaaggtggcatagccattcatttacaacttccagatttgagctgcctggagggaatccatatcagctctgcataagattatatacaaagctgtcactcacaaaaggctggatgtgctttcatccaactggaaggctttattcttccaagttcattcatactcaaagaggccagtactttgccatccttgcacttctgttatcagggcccaaataacagtggcaagctaccaactaagttgtattttaataaagattccatgggttgaacaagccacgttgcagaaaaagagcttcccctaacctgggttgttgcagagtaaatcccacgacataagctggtatcagtggttcgggggaaatagttccattctatgactcttgtctcctcctccaggaggactgttctaactagtaatcttggccctattcattacatcctctgcttgtcattctgctaatttatgaagatagtttattatagtctgtacttcagttctcatcttgtaaataatgcttaacataaacttgtacttacactgaaatccaaaatagtcatgtttctgcagtattctgtagccaacttaaacctgtgctttcatgtttaagaaatgagaaattgtgccaaagatagcagaagagtagataagtgctcagtattgacgacctacatctgaaatctacaacataatgatactgaattgttatgtaaacatcataaatagtaaataatgattcaatgtgaattttaaaatgcaaatattgctattgtttataggaaataaatctaaatataaatgaaattgaatcagtaatttatcttgggctaaatggttctaccccttactaggttgccccaattagtggcactagttggcagagctgttcatgagctgccagttatcattttggagtcagtttgaaaccagcctcttaacacactgctgttaactcataaaagagaagagtgttccatttcagtctcaataaacacttccctcattctttc

SEQ ID NO: 16075 - DNA, 1993 bp, Homo sapiens
caccatctcattgattatggcaccaggaagtctgaaggtttccacattcgatgatgtcaacctaaaccagcagccatcccgcttgtccctcttaggcatttcaggcttcctttgggatttcaggtgtcccatgatcttgatgtgctgctaggctggagcacacactggccattactgaacacagccatattagggaaagcaaaaaaacccaaaaaatcctctattgtatatttattcaacaactgtttatgtttccaggacaactgcaaagaaaacaagctgaggtggttatactgttgctgttaaaagttggtatcagtaagatttgtgttttgtgataatccctaaatcaacataccacttgtaaactgaacttcgagaaagaaacatgatgttcattctgtaaatatacatgcagacaggtcatgtactaatcctagtccttttcctgaggtagattttaaacagtatttttaaagtccaagacataggtttttctagtttattccctgaagatctgttgccacagttgggagatttcttcttaatcctgattttcttggtaagcttttttactttattatctctataatttattatctctatccatatttgtggatcgggtagtgggaaaagagattataatacttgtctttctctcctctccctccatccctcaaaagatctttatgcatttcccactactcccttactgtcttttagcattcagagaaaaagccaacttgcttaaagaggaatcacttaaaaggtaggcatatctaagatgctcatagaagaggaagaatgggacatggccccatgcttatttttgtttacaacgtaacatggcatgagagagggcagagaaactaagttgctggggaaagttagaggaactgaaagtttgggaataggctgaccacatattatgccagtgaccagtatgacaggagatggggccctgctgccagtcatctccactgaataaagaataatgctcctctttcagggtaataaagtggggaaaaggaacgtcttctcaatgcaagaacataagctttctcgtatatacctgtatgctacagtttttcacatggaattccgttttctgaggtacagcacattttaggtaacagtatttaacttgaaattcatcatgggagtctgctgctataccaggcacaagataaaactccaaaatttctgtttacattgacctttacatttaaagctgttcatccatggtgcctccccaaatcataagaccaaagaccaccaaacgcagggtggactctgctcattattctttgacccagaaagactggagaaggtatgtgctttaagtgctgctctacctgaaaagaaatcctttaaattacctatggaagtgatgtcctcagataatcttaatgactattttggcatttataaatagaaatgattatggactttgatctgccatacggaggttcggaacctggagaacggctgtgataagtaggttttgattgagtgaaagcatgagcttgttcagagtgaggggcatagtgaaaaaggaacagccatgcctcaaaatcaaatcatttgcattcccacagcatcctgaataccgactacctcttcacttgctaaagcagctaaactgtgaagctctaagtggtttgggtttgttgtttaaccttagcgagatcctttaactgcagcaatattcaagccagatatttggaagcaaatgatatttcctcttgcagtgtccacaaatctgaatattaggggcatgaaattaggcttaccatctgatttgtaattacaattttggaattctctgttttagttgctgaggcctgagttttctggctcttaaagcatagatcatttcacctgatgtttttgaagcatcctaagtacagtagagtagaaaactgatttctttgttaattgtacactgaataatgccttttaaaaatcaaaataaaattaacaaataatggtg

SEQ ID NO: 16076 - DNA, 481 bp, Homo sapiens
tttggttaagactgctgaggccaagtgctattttgttacaagaaaggaagaacttggctattttcttgacacttttatgggtgctgcactttatttttgttcggtttttgatgggagggaaagagtactgaaatgttttgtaaattttttttaatgtgctgctaggttttttgttttgttttgttctgaagagaagagtggtaccatatgttgcaggaagtcaaactggactttttgtggctactaaatttgcttttaatcttattgttctcaattttggaatcaagtatgaaaatctgcacaaatgcaatgtttacaagaactggttgattctgggaggcatctgctacagtctctttttatatggatatgtacatgtcctattctacaaaaatgattaaagataaaaacatacttgtatcccactgctactttagctgtcaaatttggtgtttcatcacattaaaagcaataaatcagt

SEQ ID NO: 16077 - DNA, 786 bp, Homo sapiens
taaccatcacaagataaggccccaatgcctacagacaaagcagaagctgccacggacaccaatgggaccaagtccaaatggattaatccaggacagaatagccacttgcttaattttctgtgaagaaatatcaatatacaaataaaagacatccctgtagcatatggtttccagctgtttctccagtggcattgccattgcccaggaggggcccagtcaccatgagagctcccttgccttacctggaggaagaatgtgccttcaggccacagtcgtgctgctagaacagtctcgtagctgcagttcagctgtgcttcctcagcctactatcataggcttcctcagccctctgtcatatggctgttttgcaaacctgtggagtctgttactgttctttctgcaaggactcacctccttgagccttggtttttgttgtagggattaaatgagataatatgagtggcagctcttcatgagtcctgcagtgctaagcaaatgtcagaaattggtgtattagactatttatctttgatcttctgaatggattgctgtcatggacacggacacggatcttcatctggttcattgtatttatatgtgagggatggatggctgcggggctccaagtaagttattgggatgtttttatattccaggtgtgctgtacattcttattttattttcacaatagctctgtgatgtaagtgctatctccatgagaaaattcataaagggtgttttgttcctttgaaatgtataatgtaaagacattaaatctcctcattt

SEQ ID NO: 16078 - DNA, 1203 bp, Homo sapiens
aagaaatgaccttcattctgagaccaaagtagatttacagaacaaagttttatatttcacattgctgtggactattattacatatatcattattatataaatcatgatgctagccagcaaagatgtgaaaatatctgctcaaaactttcaaagtttagtaagtttttcttcatgaggccaccagtaaaagacattaatgagaattccttagcaaggattttgtaagaagtttcttaaacattgtcagttaacatcactcttgtctggcaaaagaaaaaaaatagactttttcaactcagctttttgagacctgaaaaaattattatgtaaattttgcaatgttaaagatgcacagaatatgtatgtatagtttttaccacagtggatgtataataccttggcatcttgtgtgatgttttacacacatgagggctggtgttcattaatactgttttctaatttttccatagttaatctataattaattacttcactatacaaacaaattaagatgttcagataattgaataagtacctttgtgtccttgttcatttatatcgctggccagcattataagcaggtgtatacttttagcttgtagttccatgtactgtaaatatttttcacataaagggaacaaatgtctagttttatttgtataggaaatttccctgaccctaaataatacattttgaaatgaaacaagcttacaaagatataatctattttattatggtttcccttgtatctatttgtggtgaatgtgttttttaaatggaactatctccaaatttttctaagactactatgaacagttttcttttaaaattttgagattaagaatgccaggaatattgtcatcctttgagctgctgactgccaataacattcttcgatctctgggatttatgctcatgaactaaatttaagcttaagccataaaatagattagattgttttttaaaaatggatagctcattaagaagtgcagcaggttaagaattttttcctaaagactgtatatttgaggggtttcagaattttgcattgcagtcatagaagagatttatttcctttttagaggggaaatgaggtaaataagtaaaaaagtatgcttgttaattttattcaagaatgccagtagaaaattcataacgtgtatctttaagaaaaatgagcatacatcttaaatcttttcaatt

SEQ ID NO: 16079 - DNA, 89 bp, Homo sapiens
tagagtaatcatggactggacatctcatccattctcatatgtattctcaatgacaaattcactgatgcccaattaaatgattgctgttt

SEQ ID NO: 16080 - DNA, 613 bp, Homo sapiens
tccagcattggaacttctgatcttcaagcagggattctcaacctgtggtttaggggttcatcggggctgagcgtgacaagaggaaggaatgggcccgtgggatgcaggcaatgtgggacttaaaaggcccaagcactgaaaatggaacctggcgaaagcagaggaggagaatgaagaaagatggagtcaaacagggagcctggagggagaccttgatactttcaaatgcctgaggggctcatcgacgcctgtgacagggagaaaggatacttctgaacaaggagcctccaagcaaatcatccattgctcatcctaggaagacgggttgagaatccctaatttgagggtcagttcctgcagaagtgccctttgcctccactcaatgcctcaatttgttttctgcatgactgagagtctcagtgttggaacgggacagtatttatgtatgagtttttcctatttattttgagtctgtgaggtcttcttgtcatgtgagtgtggttgtgaatgatttcttttgaagatatattgtagtagatgttacaattttgtcgccaaactaaacttgctgcttaatgatttgctcacatctagtaaaacatggagtatttgt

SEQ ID NO: 16081 - DNA, 439 bp, Homo sapiens
acctgtggtcttgggagccagggtgacctgatatgacatctaaagaagcttctggactctgaacaagaattcggtggcctgcagagcttgccatttgcacttttcaaatgcctttggatgacccagcactttaatctgaaacctgcaacaagactagccaacacctggccatgaaacttgccccttcactgatctggactcacctctggagcctatggctttaagcaagcactactgcactttacagaattaccccactggatcctggacccacagaattccttcaggatccttcttgctgccagactgaaagcaaaaggaattatttcccctcaagttttctaagtgatttccaaaagcagaggtgtgtggaaatttccagtaacagaaacagatgggttgccaatagagttattttttatctatagcttcctctggg

SEQ ID NO: 16082 - DNA, 68 bp, Homo sapiens
cctaacagtgaggttccatcacaaaggggcagtattaattagcagcagcgtgcagctcagtacgttgt

SEQ ID NO: 16083 - DNA, 1114 bp, Homo sapiens
gagccagcgagacacctgagacatgctgaaattatttctctcacacttttgcttgaatttaatacagacatctaatgttctcctttggaatggtgtaggaaaaatgcaagccatctctaataataagtcagtgttaaaattttagtaggtccgctagcagtactaatcatgtgaggaaatgatgagaaatattaaattgggaaaactccatcaataaatgttgcaatgcatgatactatctgtgccagaggtaatgttagtaaatccatggtgttattttctgagagacagaattcaagtgggtattctggggccatccaatttctctttacttgaaatttggctaataacaaactagtcaggttttcgaaccttgaccgacatgaactgtacacagaattgttccagtactatggagtgctcacaaaggatacttttacaggttaagacaaagggttgactggcctatttatctgatcaagaacatgtcagcaatgtctctttgtgctctaaaattctattatactacaataatatattgtaaagatcctatagctctttttttttgagatggagtttcgcttttgttgcccaggctggagtgcaatggcgcgatcttggctcaccataacctccgcctcccaggttcaagcaattctcctgccttagcctcctgagtagctgggattacaggcgtgcgccactatgcctgactaattttgtagttttagtagagacggggtttctccatgttggtcaggctggtctcaaactcctgacctcaggtgatctgcccgcctcagcctcccaaagtgctggaattacaggcgtgagccaccacgcctggctggatcctatatcttaggtaagacatataacgcagtctaattacatttcacttcaaggctcaatgctattctaactaatgacaagtattttctactaaaccagaaattggtagaaggatttaaataagtaaaagctactatgtactgccttagtgctgatgcctgtgtactgccttaaatgtacctatggcaatttagctctcttgggttcccaaatccctctcacaagaatgtgcagaagaaatcataaaggatcagagattctg

SEQ ID NO: 16084 - DNA, 1814 bp, Homo sapiens
ttgatggaaacctgtgagtcttgggttgagtacccaaatgctaccactggagaaggaatgagagataaagaaagagacaggtgacatctaagggaaatgaagagtgcttagcatgtgtggaatgttttccatattatgtataaaaatattttttctaatcctccagttattcttttatttccctctgtataactgcatcttcaatacaagtatcagtatattaaatagggtattggtaaagaaacggtcaacattctaaagagatacagtctgacctttacttttctctagtttcagtccagaaagaacttcatatttagagctaaggccactgaggaaagagccatagcttaagtctctatgtagacagggatccattttaaagagctacttagagaaataattttccacagttccaaacgataggctcaaacactagagctgctagtaaaaagaagaccagatgcttcacagaattatcattttttcaactggaataaaacaccaggtttgtttgtagatgtcttaggcaacactcagagcagatctcccttactgtcaggggatatggaacttcaaaggcccacatggcaagccaggtaacataaatgtgtgaaaaagtaaagataactaaaaaatttagaaaaataaatccagtatttgtaaagtgaataacttcatttctaattgtttaatttttaaaattctgatttttatatattgagtttaagcaaggcattcttacacgaggaagtgaagtaaattttagttcagacataaaatttcacttattaggaatatgtaacatgctaaaacttttttttttttaaagagtactgagtcacaacatgttttagagcatccaagtaccatataatccaactatcatggtaaggccagaaatcttctaacctaccagagcctagatgagacaccgaattaacattaaaatttcagtaactgactgtccctcatgtccatggcctaccatcccttctgaccctggcttccagggacctatgtcttttaatactcactgtcacattgggcaaagttgcttctaatccttatttcccatgtgcacaagtctttttgtattccagcttcctgataacactgcttactgtggaatattcatttgacatctgtctcttttcatttcttttaactaccatgcccttgatatatcttttgcacctgctgaacttcatttctgtatcacctgacctctggatgccaaaacgtttattctgctttgtctgttgtagaattttagataaagctattaatggcaatatttttttgctaaacgtttttgttttttactgtcactagggcaataaaatttatactcaaccatataataacattttttaactactaaaggagtagtttttattttaaagtcttagcaatttctattacaacttttcttagacttaacacttatgataaatgactaacatagtaacagaatctttatgaaatatgaccttttctgaaaatacatacttttacatttctactttattgagacctattagatgtaagtgctagtagaatataagataaaagaggctgagaattaccatacaagggtattacaactgtaaaacaatttatctttgtttcattgttctgtcaataattgttaccaaagagataaaaataaaagcagaatgtatatcatcccatctgaaaaacactaattattgacatgtgcatctgtacaataaacttaaaatgattattaaataatcaaatatatctactacattgtttatattattgaataaagtatattttccaaatgt

SEQ ID NO: 16085 - DNA, 1651 bp, Homo sapiens
ctgtctttcttctgcggagggtggggttgatctgctctcagttttggggtgtggggaagacccactccagattccggggagtgggaatgagccactcccagttctggagagtgaggatgaccatctccactttctggaaccagaatgagcccccttggtaaccttgcctggtactaaaccagtgcaaggacccccttcccttattacatttgcaactctgcccaacaaaaacaagcaagcaaaccacaatggtaaagtggttaattcaggaaattgacagaatccagttttgagaaaagaacacagatatttgctgcttttaagatagagaacccaaagttttgtacctggttatttttcacttaagtttgtagacgaaatgtgccattatattagctttcctgagactgtatctaatgggcaagtcagtggctccagaggggtcttaggccaaagcccaaactctcttttggaaaactagcttattagaaagccaaagtagagttctgtttaagcttgaaagaggtatgaagtaatctgtagtgtttttttggtttgtttgtttgttttcccttccccatttccttccttccctcagtctcaaagtcaccttgaaagcttcacctggcctacaacttttattttaaaaagatgatcaagaaaacttcatcttctctgagactcagaaaaagaggggaaaatagtggtagtgcactaattgttacattactaatatagcttttgtaaaactcgtttgttttcaaaggtctggactaagcaaaacaacagtgtcagtttaggaaattattactactttgaacacaaactgaaattgcaactttgccttgtgctttgtttataatttctttatatatcaaaatgagtgttttaaagtttaacccttgaagcagcatgtctttgccatagcagcacttcacttaaaaggaagaaattgcctctctggcagcaattcctagttagttaccacctccagctgaggggctggaggaaaacaggtatagccaaattcaagaaagataaacccctgtctcaaggaacattttaaaaagaacgtctgtcccctgtgatgctggctgttatgcctttgaatggacctaactatacatctttgctcttaactccaagtctgcccttctttttaggaaaccctaaaggagaaggaagcagaatataaccctctggagagctcaagacagtaggaacctggacggtgcttgtttgaattttctgatatctgattttcacacgaatatactttttgtttgttttccttttccattttcaaaatgccaagatctgggagcctctttcactcctctagacacactgcctgagatagaagtttgcatcttattggctgtgggcagagactaggacccttatgggtacatttcagtaatctctcactgcctaaaatggtaatccctccagcctaagaggatgattctgttttgttgactcttgaatgctcccccaacattcctttggttttcctataagcaaaaccaaataccactataaatacaaaagcatctggtaaactgtaaagttactcatgtatcccaaccctccacagatttctgaagacaaagttttgcttggattaaaacaagatgttttactattttgc

SEQ ID NO: 16086 - DNA, 881 bp, Homo sapiens
catcatatacttcagacatcaaatatggaatccaagagactatcaacaacatgaacttgttcacaagttccttctgcttttaaacaaaaatatcgtgtttattcaaagccaatctgagaccctactctgtatcaagaactgtcccaggttctgaaagcatagaattagacatcgtatgtgccctctagaaacacttagactttcaaatcattataattcaatgagtcctaaaatagagctgtgtgccagagataaaagaagtcctgaggaaggggtgttcaactctgtcttggtaggtcagtaaagactttagagagacagaaagtcttagaggactaggagaagtttgccagacagacaagaatagaacattccagacaacatgcagaggaactgagtcacaaaggaatgtataagaatggcatattctaggaactaacactgtggctagagaggaaggggaaatggtgttacatgagtgagggaggggaaatggtgttacgtgagtaagaaaaaataagcagggggcaaaatcataagtagtcttacatactacattagatatcaatatttaagcctgtaggaaatgggaggcattgaagcacttaagtaaaaaagtaactatcaaatttttgttttagattactctggtcatcagagaaatagattaagtatttaagaggtagaatctctcagacttaggaaccaactgcatgaggcggggcttggggggataaatttgcaagataataaggatgtagaattgaaaaggcctgatattattgaagctggagttgcacattcattttgctttggcttttttgtatcagtggtcatgggcaccaaataaaatgcttccatgaacatttggattctggctc

SEQ ID NO: 16087 - DNA, 870 bp, Homo sapiens
tctgcctgctttcactgtgttgttcatggtggctttttggacaataaagaatctaaaatgggtggggagggtggaagaaatggtggactgtatctctcacgttctgaagcagctaatcctctttcccacatagccatcatcttgtgtgtgtagtaagaggcccatttctcaactgtcttttaaatatctaaaggtagttcctgtaacaactagttttaatgagtaaaaagtcaaagcctcagctctagttgatatccaagttatgatttattttgcaactacctcaggacagaaaagatttatggggattttaaaaatcattgaataactagttaaatgaaattttagctacacactgcctcccaaatattagttgtgcctggttcttgtaatttgattttacagaaaaggaaatgacacttgagatccttggaatgaacacagcttctaaagtgtgcatatacttttttaacgtctcttcttccattacaatgtgtgttttgcaaggacaggttcattttttttagcccactttgtgaactccattgtgcttttttctggtgttttatgcaagttgactactaatgactaatgagaacaataatgaatgcattgttgctgcattagtgtaatgtggtgtggttttgcacttaaaagaggtattcatatgctctagttgtaaatgttcatgaaaatccacttctctactagtcgaactgcttttagtgtctcaccagtggttttacatctgcagagttttgagggctgtgctgacctttgagaggatttgaaattgcttcatattgtgatcctaaattttatattcactatattccctaaagtataccttaataaatattttatgatcag

SEQ ID NO: 16088 - DNA, 918 bp, Homo sapiens
tctgcatacatcgctgcaggccacagagcagcttgggttggaagagagaagatgaagggacatccttggggctgtgccgtgagttttgctggcataggtgacagggtgtgtctctgacagtggtaaatcgggtttccagagtttggtcaccaaaaatacaaaatacacccaatgaattggacgcagcaatctgaaatcatctctagtcttgctttcacttgtgagcagttgtcttctatgatcccaaagaagttttctaagtgaaaggaaatactagtgaatcacccacaaggaaaagccactgccacagaggaggcgggtccccttgtgcggcttagggccctgtcaggaaacacacggggacctctctctctagctccagcaggtggcacctcggtacccagcgggtagggcgataatttatatattttccacagtcagggaaggactctcacttatttgtttcaaattgcagtttttataaaacatttttaaaacacaaatggcatgtatgctaatgagatttacccgtgtgctatctgtatttcccttgtacagaacttttacatttttgaatattcctattacttttgattgtgtctgatgggaactgagttgttggcctttgtgaaatgaaatttttggctcttgagaaagaattcttatgaattgttatgcgaattttatatatttaaagagggagatctggggctgttatttttaaacactttttttcataatacatattccgagtagatatttataaaatatatgtttctttcattatgtgtttgtaaaattagagtttaaataaatatgctttgatgcatagttttgaactaatgtaacatgatttttcttttttaaaacagcctgaaaatgtactagtgtttaaaaataaagatttccattttctcc

SEQ ID NO: 16089 - DNA, 1067 bp, Homo sapiens
caaatgccctactctcttatgcattagtatcacaaaaccacctggttgaatataatagattgagttattaactgtattttctttcactttattaccttctttctaatacaagcatatgttagcattaaagttctaggcatacttttcaaagctgggaagaccctttcagaatcttttcaatgggttttaattttcagttctatttaaaatggtgaatgacactaaactccatgatatttaaggatagtgtgaagatctttggcatgatttaaaggttgagtatgtgaagatataagtaagtgaactaccatgctttgtttacgtgtaaaggaaaataatgtttgatagtaaatgtccacttaaaatacatgaatgggcatttctaaaatgttaaaacataaacacatttccattcatggatatttgtcaacagatttaaagaaaaccacagttattaattaaagaaaattaattatgtgtagttataaaccaatgaaattttgattaaccttttcaaattaatgttccagtttgaagaccaatcaaatatattatttagtcaacatatactatttagtctcaggttcaaggctacaacaaaaatcaccatctttgtcaaactttggagagggaaaatcttcactttcttaagcaacaatggatattgcctgtgtttgccactgtgtttccctgcctctcaattcgctgaaaaaggaactacctatccttacatttcacctactaatgtctcttctaacatcttagaggtccatggagaaggcatatggagaacatgttttatactgctctataaatagtattccaatcactgtgcttaatttaaatagcattatcttatcatttatcagccttttatgtattttccaagtaaaatattaacatattatttcattggtcttcttttttatctggttctatatgaatgctattttttcccttctcttctaacatgaaatatattttctctttttgatcttgtgctatgaaacaatcttccaaagaactgtataaggtggtcataagtgaatattttaattaaaattggt

SEQ ID NO: 16090 - DNA, 1299 bp, Homo sapiens
tgacagttttttgcatgggactggtgtgcaatgaacttgtatttatccttcttctccgctgctatatttttggtgtgatttttattttaataagatgacctttttaaaagaagctgattttgaaactgcttaatggtattgctgttgctcctaatacttctcatctgagctgatttatttttctctgttacatctctattttttatttattacaatgattttctcccttcttttacagtagcacaaacaaagtagggggaaaagaataagcaataattatgtttttgcttttgttttcagagcaatgggtcagggattacaagaaaaactttgctaaattttacaataaaccaaagtctgataacagttaatgttgctgcttgcgtccttaaatgacttaaggtttcatcttccagaagatattgagatatattactgtttgcatatcaggttgaacaaaatgcttggaacaaaattaagcattatttctagaccacaacattctagtgtataatcaaccatactgttagtcacacacgcccacatgacaatcatctgaaagtccccaactatacacattctgttcaaccaactcacccttgtgttggtactttagattaacattttgtcatcagtgattctaactcaaatcatatgtttatttgtgtaataaaatgtattattctcccaaatttcaaggaataattgagattaagtatggaggccattcaaggcaaaaatgtcctaaatttaattgcattttgagattttgttggcatttacttgtatgtattttgtgattctgataggatgtataaatacttagatgcatacaagccgatggatagaaagacagataaatatcccgatagcctactatcagcatcctactactgcttccctaaagcagaattgttattcatttaagaagtctaatatgatatacattcatcctagtataaataaataatctctaagttttctgaaatggaatatttaacgcacatagacagtggatatttactttaaatataatgttattaatcctctgcatttcttttatcttgataactcctagtgagggaatctaattaagatttcatgctgttctttgtaatgataaatgtttccggactaaacactctataatacaaatcaaaaaatcttccttcttataactgagaaatgtttcacccaaatttcctttgttattatatatttactacacatgttgaatttattattgtttatttccaaggcatgtattattcaatttctaattaaaatatatcagggctt

SEQ ID NO: 16091 - DNA, 61 bp, Homo sapiens
cttcatgaaattaaaaaatggaggaagagttaacagtacaattaaaattgttttgaatggg

SEQ ID NO: 16092 - DNA, 1265 bp, Homo sapiens
tattaaaatggagagctttattgcaaatgtgaaaactttttatgtggtgtgattggaatacatgcattgcaatcctgacacggtatctgctccaactatcaatagtcaggttcaataccaaaataagaagtctctgaaaataattaattgctgaacaagtgaaactaattaagtacatagccatttaaaaggaaatagtgtagcatctgatggtcgaatacaaatattgccacaaatcagtgcaaacttaaaaatgattttccttctagtgcattaaaagaaactgagcaggcttggtacacacaaattggcctgagcataagaagaaaaagtatcaactaaggatttaatgttttacgtttcatgaagaaactagactttttacataaaactgctatagatggccataagtggtccagggagcaacagatttgtagtatgagcaaatataaaatgaagcatcataacttgagcatttattgaaataaattgtgtggtccaattgaatctgttctcattgatgtgctggtttatgtaggagatactgtgtatttctacaactctttggcaaaaacaaaaacattttcttcttctctctcttaacttcacaatactatacgttgtgtagtcatataaatttgcagggaaccacaaacccaatgtataaaattaggctctatttaacagaactactactgtggtcagctaatttaagttacattcttaaccatgatgtcatccttatttagattcctggacattcccacctcatttcacctcttcaccgtgttcctgccataccctttttggttcctctaattcaccatactggtgcctgcctcccacatttgcccttggtcttctctctttctagaatactctgcactcaactttcctcatggctggctccttgtcatcattcagctccaccttccccggtccctcagagacacattctctgaccagcttactattttatttcctcatagcacaaaattatctatctgttcatgtatttgttttcttgtttattttcttcttttccctctttagtatgtaggtcccatgagattaaggcaagggttggcagattatagcctgcagggcgaatctggcctgccacctgttttgtatggcccacaagctaagaatggtttttgccttattaaatggtttttaaaaaatcaaaaggagaataatattttgtagcatgtgaaaattatataaaattcaaattttggtgtctgttaataaagttttattgg

SEQ ID NO: 16093 - DNA, 1379 bp, Homo sapiens
gatgttatgctggctggctcgcctcctcttgacccagatagttacggttaaccactgctttggcaatgctgcttataacacatcccaagtgcaggccgcagtggtccacgtcatccagccccaccaagtgactttggttgacttgtgggctcccacaggagtcatggtgatggatgatatcctcttagcctggtgggcgtggcatgtgctttttaaaacatcatctgagaccagccagtagtcacagaactgctgtttacacagttctcaggaggctgtggtttcttagaatatgaccatgagccatttcacagaaaaaccatcccaccgaagatattgtctatcaccccaggggccatctgaaggtctctttgcatttctccatgcaaagaggagaaagcttttgctttcacactgtcccttcccaaatatgtgagtcatggaattgtcaaagtaagccttccctcaccagcaaattgtctcctgatctgaatgaatttgtctcttaatgcatccatagaaaagtgttaattgtgggttcaaagcattctctgcaaataggcatctcagctcctcacacttatggctatttctgacgtatagccagttttcttccctccttgctattaaagccagagcggtaattccaaattatttttcagtaagacagttaatcagcattattgtgagagggactgaaaagaaattctccattatgaggaattgggaagaaatctggtatccaagcttaaatttcttgctatacagaaactatgtatgtatttaggctatttctgaagggcacagggaagggggaacaaatatcttcacttcagttttatttgtgaattacatgtttcatgaatccatttggcacagagacacaaggaagaaaacactagtaaccatctttccactagttcatatactgagaaacagtaaatacctttcctttccacttttaccctgtgttctttgaacatcatttgtgcagattctgccctcaatgaggaccaaataaagatgatttttgtgcttagcagtttaaggtatatggctgcatatgcaaaactctttcccaattcagtcgctacttttacttctgccctttctatccatcgtcttcattttgtgtgtacagtgctgtgtgtaagcttatcagtgtgtttttttatttgtatcagtcatgaaagtcctgttaggtatgcagagttctatttatctagctgtacagactctttcagaggtttaacgtgctgcttccgatgtgccacctgcagtagtggatcatgtggagtgaaaggcaaatcttactgcttaatgtataaactctcaccacaggaagcatcgctgtttccaataaatattgctgaagacag

SEQ ID NO: 16094 - DNA, 150 bp, Homo sapiens
gttgtaaaagcacagactgttctatatttgaaactgttttgtttaaagaaagcagtgtctcactggttgtagctttcatgggttctgaactaagtgtaatcatctcaccaaagctttttggctctcaaattaaagattgattagtttcaa

SEQ ID NO: 16095 - DNA, 420 bp, Homo sapiens
atattgccaaatgctctttctgaaaatgctgaattgccttttttgtttgcatcctttatttttaatattcataatgtcgtgtgcttaaaagtgggctttgaagtgtgtgctgcttactcctttcatctttctccccgcttccccagtctttaaacattggacgctatttactcagctacccagtagagcttgaagctgacctttctgagaagttggtatggtgtaacactaaagtaggtggttcgtgtgtgttctcattacctggttatgatagatatgcacatcaaagcctttaccagtatcttcctgtattccgtatcagattgcaaagacggaatgttactattttatcagcaaggtattaaaatgcatttataaattcttcttggcttcattcatgaataaacgtgttagcaattt

SEQ ID NO: 16096 - DNA, 1967 bp, Homo sapiens
atagagattcactagaatgttgacacacaaggcttggggattagatttcatctggaaacattcaagtttttttttccaaatcgtaagaactggtgaatacggaattgaagtaactcttggggacaatatataatgaattatgattcatattgcattaccttgaaatatgaagtgccatttgaatgtcccagggcttattaatattgaagattttcaacccctgaactgcttttctgcctctgtggaaaactactttgggattcttcagtatttgtagtagtttgatagaaataatgaggaaccatattcattctaggcattgtttatatttgaagttactgagtttgaggaatggcaaattaaatttgcctaacccccaaaacaaatgaaatatctcaattataaaagcaacatggccgggcacggtggctcaggcctgtaatcccagcactttgggaggctgagcaaggtgggtggatcacttgaggccaggagttcgagaccagcctggccaacacggtgagaccctgtctttactaaaaatacaaaaattagccaggcgcaccactgtagtcccagctactcaggctgaggcaggagaatcgcttgaactgaggcagaggctacagtgagtggagatcacgccactgcaactccagcttgggtgacagagtgagaccgtctcaaaaaaaaaaaaaaaaaaaaaagagagcaacatatttgtgtaagtttgtatatgtgtagggctgtgtaggtatgtgtatatacagccatattctaagtgtatatttattaaaatagattgcatgttgcaatacggttttctgaaaggggtctcattgactattaaataaatgactactactaaacttgtctgtagtcattaatcttaaaattacctgaaaatctgatgacagctgccttccctaactttaatgtattaggttggcacaaaattaattgtagtttttgccactattaatggcaaaaaccgcaattatttttgtaccaacataatacacctttcatattatgtattatcttgcttaatgggttttatcttgattatccagttacttccatcctcttcccaatgttaatttgcaatagttttaaaatgggaacaaatgaatcaatcatcagatagttaaaatgaaattaaatcagctgcctaataatttatggaattcattggaatgtgcttaaaatgctaaagtgtatgtcattgaacatgaaatcttttttcaggcacatacattgttggtattgatgactttttaaaacctgtgggataaacttgcactgcacacggaagttttattcttgtatatttagatttgtatgcttgtgagtaaaaatgtgcatttgtaaatactgtgtttttaggttgaatcaattaagtcttaaaactgtaaatttattaagcttgttgccagtaggtttaagaaaatcatgatctcacatgcctcactttgacatttatcatgccttttattaaaaatatcccttaggaacagtaagtttgccttaactctctgcatggtttaaaaagccattggttttgtgtgtgtttacagtaattatgcagatgactaaatgagttgacacagtaaaattacttccatatggtacagtaacaacctaactcccttctacctgatgtaaccatttacaaattatagttattgtaccagtctttcaacatttcagggttaatctgacctatgcagaattctagtgtgaatttattgtgaaaatgctaaatgaaacaatttgtcagaaattatgtacaattttcattaccttcaaaatggatcttttgcactgtctgagagtatatatttttgcaactcaagacttggtactagttttaatacttaacacttactgacccaacagaagtttggaattaccttgcatataaaaattgaggttgaataaaatgaaaaattgttgttttctgttac

SEQ ID NO: 16097 - DNA, 1866 bp, Homo sapiens
tggcaagatggtggctggcttctctgcttatcgcccctcatgcagtgggcttcctttgctaggaagacagccaagggagttcgaatagttggggtgtgggctatcttttcaaaaatctatttgctggggctcttaatttctttagtgttctttgtatgtagggatttaaactttgtcatatggtacaaatattccctgcccccctgcagtttcccatttgtctttcagtatgttaatatttttgtgccatactggttttaaactttcatgttgtcacatctgttaatcttttctttaggatttctggattttgtgtaatttttaaaaaggtcccctcctcctccctaatgtgtctgtggaccacctggattccactgtacaaggggaaaagtgtctattcctttcccaaagatggaaaatggagggcttagggacactagatgcatctttctcagcatcacttccagatgcagtgacttgttgggctgcgtccttaatggccatggcagagcagtcccttgggggatccagccctgtacaatgcatctcttcctggagaaagctggcctgctccagaccccaccattcccaggcgcccttggagtggactctactgatgacagacagaccctctgagagacaagaccctctgactctgtgatggaagatgccagagattttcctttggggtaattgtccttaaacaaaaccaaacagatgaaacacacacaggacttgtggctaaaaaggctagtttttcacttgcatttctcaactaacccaggttttacatgcatctgtgaatccttttactactacctctgtggagagatggagagacttcagataaacgtgaagctaatgagtaaaaccctctctgccaaaacctacactccactttaggcccttcttgaagatgagcacaatttttaaatactgagcacaatttttaaatactgacatcacttcctcttccccctcccaccccagctcagcagcctcaaatctacagagaagaagaattatggcatgaacattcccacagacccaccatctttaagacttgacctctgtaagtttaccaaagggctcctcacaattgtggtgggggttctggttcaaaatttggagcaaacatgaagtttttggaaacgttttctcatttgaagcctccagtatgctgtactattctggaaattaccttcaagagtctcacttcttgtttctgttgtgttttctgtgggcatcatgttcttcacgcttgcagtagaaggtgctttctcggtttcccagagtatccaacggctcacctttctcaagtgctggcagtagctatgcactcacgggctggtttgggtcgctggtgcagcagcgcaaatctgttgccttctgaatttttctcacctaatgtgacactggctacaatgaatcttctcttcatcgggctgaatgaaagattcaagaaccatcttcaaggtgcatggtgggaattatcaacctcagggatactcattttaactcaggcgtgtcctgctttgtaacattccattgttgggagagggcaggacaggtgtgttcttctgtgggcaggagtcatgtcactgtcctacatatgtaagagttgggaaggtgacgatttttgacacatccaggaactcttactctagttagaatttgtaccagatccaaggtgaaaaccccaataagcaactgaatttagagtttaaaaatgaatgactttatgctacatctgtggttatcaaattatataggttgttgagaagcagaacgctgtttgtagtaagaaatctttgtggaaccccagtgtgtgaagtaaattgtatgttattaaatttatttaaggtt

SEQ ID NO: 16098 - DNA, 326 bp, Homo sapiens
acagttttgcagtaaccagcagcattctcagctggatgaggaaaaccatataagtggaagaagtttttcagaattcatgcctggtattgctgagacatgatgcagagagttaagggtcatgaaaagatggccacatcactgacagcttgacacatgcctcctaagagaggagtgcattgctttagtacccgggccagttgagactgaaacaggaacttggattttctttatttggcttgagttcaatgtggagattttctttgtgaaagcttgaagatattatcttctccctgctaaattccagtaaaataatgttgtcaattttg

SEQ ID NO: 16099 - DNA, 439 bp, Homo sapiens
gacctggtacaacacggaaatgattcttatagactaatacagcagctcacacttcgacaagttgtgctctttcaaagacccttgtttctgccaaaaccatgctatgaattgaatcaaatgtgtcaagtgttttcaggagtgttaagcaacatcctgttcagctgtatgggcactagtcccttacagatgaccatgctgatggatctattcatctatttatttaaatctttatttagttaactatctatagggcttaaattagttttgttcatattatattatgtgaacttttacattgtgaattgtgtaacaaaaacatgttctttatatttattattttgccttgtttattaaatttttactatagaaaaattctttatttattctttaaaattgaactccaaccctgattgtgcaaactgattaaagaatggatggt

SEQ ID NO: 16100 - DNA, 239 bp, Homo sapiens
catctggtccaacatgaaaacaattcttattgactcatacaccaggtcacgctttcatgaattctgtcatttcaaagactctcacccctgctataactatgaccatgctgataaactgatttatctatttaaatatttatttaactattcataagatttaaattatttttgttcatataacgtcatgtgcacctttacactgtggttagtgtaataaaacatgttccttatatttactc

SEQ ID NO: 16101 - DNA, 3954 bp, Homo sapiens
agtagcatggctgcccaggagaaaagaagacattctaattccagtcattttgggaattcctgcttaacttgaaaaaaatatgggaaagacatgcagctttcatgcccttgcctatcaaagagtatgttgtaagaaagacaagacattgtgtgtattagagactcctgaatgatttagacaacttcaaaatacagaagaaaagcaaatgactagtaaacatgtgggaaaaaatattacattttaagggggaaaaaaaaacccaccattctcttctccccctattaaatttgcaacaataaagggtggagggtaatctctactttcctatactgccaaagaatgtgaggaagaaatgggactctttggttatttattgatgcgactgtaaattggtacagtatttctggagggcaatttggtaaaatgcatcaaaagacttaaaaatacggacgtactttgtgctgggaactctacatctagcaatttctctttaaaaccatatcagagatgcatacaaagaattatatataaagaagggtgtttaataatgatagttataataataaataattgaaacaatctgaatcccttgcaattggaggtaaattatgtcttagttataattagattgtgaatcagccaactgaaaatcctttttgcatatttcaatgtcctaaaaagacacggttgctctatatatgaagtgaaaaaaggatatggtagcattttatagtactagttttgctttaaaatgctatgtaaatatacaaaaaaactagaaagaaatatatataaccttgttattgtatttgggggagggatactgggataatttttattttctttgaatctttctgtgtcttcacatttttctacagtgaatttaatcaaatagtaaagttgttgtaaaaataaaagtggatttagaaagatccagttcttgaaaacactgtttctggtaatgaagcagaatttaagttggtaatattaaggtgaatgtcatttaagggagttacatctttattctgctaaagaagaggatcattgatttctgtacagtcagaacagtacttgggtttgcaacagctttctgagaaaagctaggtgtttaatagtttaactgaaagtttaactatttaaaagactaaatgcacattttatggtatctgatattttaaaaagtaatgtttgattctcctttttatgagttaaattattttatacgagttggtaatttttgctttttaataaagtggaagcttgcttttttaactctttttttattgttattttatagaaatgctttttgttggccgggcacagttgctcatccatgtaatcccagcactgtgggaggccgagacgggtggatcacaaggtcaggagatcgagaccatcctggctaatgcgttgaaactccgtctctactaaaaatacaaaaaattagctgggcgtggtggtgggcacctgtagtcccagctactcaggaggctgaggcaggagaatggtgtgaacctgggaggtggagcttgcagtgagcagagcttgcagtgagacgagcttgtgccactgcactccagcctgggcaacagagtaagactcagtctcaaaaaaaaaaaaaagagtgaaatgctttttgtttgcttcagttttttatcatggggagatctttttcctcagaattgttttcttttcactgtaggctattacaggatacttcaggatcaagatacagaaccttttatttaaagagtttgtaaagtcaatgtgtttgtttgtgtctctgagattgacttcaagataataagctgctaattgtaaacaaaacagttaccctccagtattaatatgactcattagtgtgagccatttgggtcaagtatgattatgacccttggacttcctgatgtagtattaaatttcaactctggttatccattagcaatctgtagagaacttaatgaacctgaacccaggcttctctagctctggtaacgtgtgattgttttcactacaatatgatacatagatggtaccttacttttcctcattcttaataggtgtctaagaatgtcagggcaaaagtatgggcatttttcttgctatgttcagaaagtacagttctctccaacttgcagaggtacttttcttgattaaatagccttctctagcaacatcattttcagactaactaaatgaatgcagtatactcttttctttgttctcaatcattcactccttatgcaaagccaatataattttcctcataccttatgcttgaggatattgttgaagaacacttcctggaacacttctcacttgtgatgctgtactaattttttttttttaatttaagctagtatactaagtgaacaccatggtcagttgtgagcattttggtttccgcaaaggatggatggtgagcatcatgggaaagctgtagtttagtgacttagcccttagtgattaatagatttgcatgtacatagaagtctttgttggccttataatctgctgttatatttggcatggattttcatggttttgagaatgacatcctggccctgtggtccccgagggtcatggtccttgtgacctggcccctgttcactgcccccttcgctagcacgagttgctgtgcagggctggaggtagctaccatggcttgtttcaaggaaggaaactctggtacggtggcaccctcaggagtggaggacagtgaacttccttgaagagggagtgactaaggtgacctccaacctgccctgagccagctgccctgcaggtgccacgtgagcctgctctggcatccacaggatgctcctggagcctcttctctggctgctacctcagggcatggttgtggccccaccaacacctattttccaaataattattcattcttgtgacagtggcctgaacatgtttttaattttctcaacaagcatttagccagcacttatccagtgaaacaatttgataaggtttcaaggagtatctgatgggttaggaagtcacgaaatgaggagttcttgccacatttgcagagtccctccttgataaggtttggcggtgtccccacccaaatctcatgttgaattgtagttcccataatccccacatgttgtgggagggacccagtgggaggtaattaaatcatgggggtggttacccccacactgctgttctcatgatactgagttctcacaagtcctgtttgttttataaggggcttttcccccttttgctcaacacttcttcctgccatcatgtgaagaaggacgtgtttgtttccccttctgccacgattgtaagtttcctgaggccttcccagctatgtggaactgtgagttaattaaacctctttcctttataaattacccagtcatgggcagtcctttacagcagcatgagaatggactaatacactcctcaaatgttttgaagattgttgcaccttggaactaccagtgtgcacacaatctggctcaatgtatatattggcccagcaaggcaaagaactgaagttccaggatggaagaacctgtgttctcctcataatagtatagaataattcaagataggcaagaaggacagcagtaaatgaagaccatggaagaaaagaaggaatgccaaagatcgaggaaatctaccaagactagtagggtagtccagaagaagctgtttcagggcctgttgccagctatgcctttgagaacctcgggatcccaaagaatgaggggaatttcttcagaaagacaatctcggcatgcattatttctttgttttgaagattcactcatgttgcatgcatctgtagcttgtgccttttttattgcctagtagtattctgtcatatgcctatcttacaatttgattatctattcacctgttgatgaatgtttgaattttttccatttgaggaattttatgaataaagctgctataagcatg

SEQ ID NO: 16102 - DNA, 562 bp, Homo sapiens
tgtatatgcccattctctctttctggagtttttccagcatacaatacatgcacgtgcacacacatacacacacatccattaatatacttcagtaagtatgtgagtggattatgaggtcttaaaatgctgggttttttttttttcaagcaatataataggtcttagatctgaaaactcttcattaggatttatcaagtgaaagaagtaaatctgaacattatatgtgccttgaataaagctatttcaggaaatatttaatgaattttctccctaaattatcatttgtaaacatttttattttaaaactagtttttattttattgaaaagtggaatttttagtgataaaatacatttgtaagtgtaaagcaatacagcataatagaatagaatataaaccgaaaggaagaactgaacaattaaggcaattctaaataattaccatttcaaaactgtttcttctattcctggttcataggaaagaaaaaagttattcaaagtatttttaaagcatttgatttgcagatgggtgattcgtaataaataaaacatttgagcattttg

SEQ ID NO: 16103 - DNA, 197 bp, Homo sapiens
gtttaagtccactgaaagtctctaaggaagtatcctcttgctgctaaacttggtacaagttgactaccaaaaaaaaaaaaagcttacttttggagtttacctaaaatttctgaatgttataatttttgtggcctcttttaagaatgatattttaaaatagtaaatagttcaataaatggtttgcatattaaaaagta

SEQ ID NO: 16104 - DNA, 941 bp, Homo sapiens
gacagaacatctgtataccctctgtttccctttcactggcatgggagacccttgacacctgctgagaaaacatgcctctgccaaaggatgtgatatataagtgtacatatgtgctgtacacctgggaccttcaccactgtagatcccatgcatggatctatgtagtatgctctgactctaataggactgtatatactgttttaagaatgggctgaaatcagaatgcctgtttgtggtttcatatgcaataatatatttttttaaaaatgtggacttcataggaaggcgtgagtacaattagtataatgcataactcattgttgtcctagatattttgatatttacctttatgttgaatgctattaaatgttttcctgtgtcaaagtaaaatattgttaataaacctaacaatgaccctgatagtacaggttaagtgagagaactatatgaattctaacaagtcataggttaatatttaagacactgaaaaatctaagtgatataaatcagattcttctctctcaattttatccctcacctgtagcagccagtcccgtttcatttagtcatgtgaccactctgtcttgtgtttccacagcctgcaagtcagtccaggatgctaacatctaaaaatagacttaaatctcattgcttacaagcctaagaatctttagagaagtatacataagtttaggataaaataatgggattttcttttcttttctctggtaatattgacttgtatattttaagaaataacagaaagcctgggtgacatttgggagacatgtgacatttatatattgaattaatatccctacatgtattgcacattgtaaaaagttttagttttgatgagttgtgagtttaccttgtatactgtaggcacactttgcactgatatatcatgagtgaataaatgtcttgcctactcacgtctc

SEQ ID NO: 16105 - DNA, 490 bp, Homo sapiens
aatcatctaccttcaagcaagaattaacagagattgtggctacgcaaatgcaccaaaaaagggtgaaatatatctgaaatgtacctggttctgcccttggaagccatttcctgctcatgccactaacagcatgctgccaaactgttcagattcaagattattccaagcgcagggcccaaatgttatagccaaagaaagtcttatgataaaagtgaggcaaatttcagccaagaagttagaagagatgtttaaaagaacaagaacaaattgtggatcatggtatatgcaggctatcagcagaaggatcagacaataaaatgagttagtgcaaaccatttagtaaaaataactatcagcagagttgttccagattaaaaatagtactacaagcttgtaaaggagttaggacatgcaagctactgagcataaaatatatacttgctatttttcatgactttctctaataaagtctttgcctgttctctctaat

SEQ ID NO: 16106 - DNA, 721 bp, Homo sapiens
gagacgtgcacttggtgctgcgcccagggaggaagccgcaccaccagccagcgcaggccctggtggagaggcctccctggctgcctctgggaggggtgctgccttgtagatggagcaagtgagcactgagggtctggtgccaatcctgtaggcacaaaaccagaagtttctacattctctatttttgttaatcatcttctctttttccagaatttggaagctagaatggtgggaatgtcagtagtgccagaaagagagaaccaagcttgtctttaaagttactgatcacaggacgttgctttttcactgtttcctattaatcttcagctgaacacaagcaaaccttctcaggaggtgtctcctaccctcttattgttcctcttacgctctgctcaatgaaaccttcctcttgagggtcattttcctttctgtattaattataccagtgttaagtgacatagataagaactttgcacacttcaaatcagagcagtgattctctcttctctccccttttccttcagagtgaatcatccagactcctcatggataggtcgggtgttaaagttgttttgattatgtaccttttgatagatccacataaaaagaaatgtgaagttttcttttactatcttttcatttatcaagcagagacctttgttgggaggcggtttgggagaacacatttctaatttgaatgaaatgaaatctattttcagtg

SEQ ID NO: 16107 - DNA, 4310 bp, Homo sapiens
tctctgcctacaaaggtggctggattgatagaatatgactaagcccagctccccgtggaagcaaattgctctgcttggagagccttcacactgttagaaattgacctggtatgtgatgggtgtgataacctctggtacccgagagtcatgtaaataggcatgttggggacacattttagggaagggcgatgagggttaaggacactggaagaggcagtgggtaggaaaggaagctactccagttgcttcttaacaatttacacaatgttaaatgttttgtaaaataacccaaaaagtgctatccagaaccagctgagagcaagataaatctagagtgggctgcagatgtgaggcatcaaatgatgcatgagctgaccacagggaaactgagctgctttatgtttgaataagttgaaaataaaattaatgatccgttatataaagtaatttttgcctggttaaaagcttatcacacttggtatttgctgaaagaaaaaaaaatcaagatacaagagttaaaccctccttagatgggatggtttttgggaaaagggtagttaaagagagttggattatgtaactgagtcttgtggcattattgtctgacaagatcatggtctctaataaagtaaaataagtgtgagcagctatgtgaaaagttaacatttttagatggctatgttacttcttaaactcttcgtttaaatccatttattgcatctttatctgaaatgggttttttctaaacatttactatcattcatgtattatttccttaccaggtgcaacattatttgaaatgatactttcatagattggaatttgttttcatcaagacaaaatgaattttacatatatatccaagtctttaacattggcagacatgtactgataattaccattcctacataccttttaaaatctgaaaactataaagtctacacattagccttgaacattgcacataatttgtatgaaatgcaatggttaaacctttggaagtgtcattatttgtacatttgttcaactcctctcacagactgtaaatgccagtgaaacaagaactcatctactaaatttaactgaagcctagattttattaagctcacctgatcagtgaacattacatgataaaagtctctttatttcatacatttttgctgctgaggaaaacaacaaatcacaatgatatcctaaaatgtgctttctatttcacttgctcaactgcaatagataagaaggctatcaagcagaatgccatttgatccccggtgaagaaaaatatgaattatatataggaatggtgatagagttcatcttgaagatcagaagtattttgtatccttcaaagaatgatcattttaagtgatcatatagtcttagtcactttctcccaaaaggggaattgaggacaaaaatttgggcatatatgttttgtgtatttcaattccaactctgcaattctttcttaagtatagcaattgttctgtcttaagaatcatggtatttttaaaaaatcataattttcaagtcaagttcaagatcaaaaatatgtaattattttagtagggcttaaatatcagaaatgagatgcatgatcttgggcaaattttatcttcttacacctgagtttcctactctgtgaagggagggggaactgatttacacttgattatttctatcattcattttcagtgtaaatattctatggtgttatgtcaaaggcattttatatattgccaggaaatgagttacagcaaaatgcatgccaaagttatgaaatttatgataattatgtgacatacattgcacagctactactcaaaaaagaattttgtagatgtatgaaagcagattattcaacacaatgcattcctgagaataaaatgaacataatcagagtaaaatatttttgaggagaaaacttaaaatgttggtataactcaaagtaatctaatacacaaccttgcactaaatgtgattgacatttggatttgggatggggagagatagtttcctaaaatcacagtaacttttaataattgtaatgcattttgaaaacagagaatcatatttttataatggtgagaactatgcaataactctttaggaatgaaaacttcctttaagaagtttgccaccgttagagatgaggagatagtgagacagagagatgttcacagagactcagcaaatcttagacaataatgctgcaattttctgaaagaagatgcttgcagtgtcaggtatggtttgggggttggaaaagttacttttctgatttcttggaaccatttaaaactcctttatatcattctgtctctttccaaattgagggtcaactactagtttagagatataaggtattttatcttgttttcaagttctacttcagaagaaaacctatttcatgtttcttctcccattacctacttaagatacttaaggtatttaagtatgcatttgaggaaatattttcctgtgctaaaataaaggtttgcaaatgttggtgtgagaggttttaactttgaccagtgagaataaaatgtatgattgtgtgtgtgaatttctcctaacatattaaccaactcctttctatatgcaacaaggtaacctggtgccccaaatcaatacttgtaagtactattcagagttaaacttccaaagtcaaaaaatatatatacacaaaaaaaggggaaaagccacatttttttgaacagaggtagaagagaaagagaaaaaaagtgtctcagccctttagaggaaaagagagcaactcattctgatgagttacacagttttagcaaattgttcttatcaatataatagacatgaggattgttcctggtagccttcaagagctcctagacagatataaatttaagtagacattactttattttgctgttaatccaagtagacattgcgacttgattctgaataggcattttattttcaaaatttttctactgaatttctcttgctctgtatgcctacttattgtgcacatgggttgtttttccaaactgcttcttgattcttaagtgagaattcagacatgatactcaaacgagagcatattagacatctgttttaagatttattttctgttgcagtcatcttggcaaacaaaatccagatacagttaagttcaggctctcttccaaaccctgctaagcagctgctttgaaaatgttttcaatactatggatcttaatatccactgagatgacaaatgtaggaaaggaagattcattctgttaaatgttttttctcttttgcaatgtccaagctctacttatttattaatagcctccctctgtacccataacatcatttatttggtgaattcactgttattaatactagtattttatcacagtaaagaaaaggtttctgaaaacccacaacctcactatcctaaagcaactactgtgtttctattttggtatatcatcttccaggcttcctccacatgcaaatgcagcatacatattataatagtgtgtttttcttttctctttgaattatattccatgcatgtttccatgtttctatgtagtatttctaattatcaatgaacgattgtgtaatatgccattttagtgatgttccataatttatcatgccattccttattgctggcaagatactaagttttatggatgattttgtatgtttttttcctattgctggttacactgctatattatttgttatatgccaatagagaggaactttactattgaacaggtatctccttgtggatgagagagaggaggcagaaatgtgtaaatgaatggaactctccatattgttgtgtgggtcttcccttcactcttgtggatataagacccagggtgggaaacaaaacgatgcttcttccaaaagatcctcccatcaggaccagaactagtatgtttaggagtaagatggaacatttccccagctaagataccagtggtgtgtttctcacaattagattacagtggtgtcagtcttcaagagcatcgtgttcaacaagcaaaatgataaatagatgtaaacaataataatgactttgtaatatgccaaaagcattttcttaaagtacctcatcatatattttataatagatgtatttcatatgtatatgtattgtcgcctatcagtgacttacaaatgaactggaatttcaggaatctgatagactctgcccttgagttttctgtgtttcagtttcctactgggaaaaactaaactgaggatggaaatggggacaaatgcttggtttgcccaaatatcttaataaaagactagattccattcaa

SEQ ID NO: 16108 - DNA, 161 bp, Homo sapiens
tgggccagtgaataacactcactgctggcatttaatgtgcagtagtgaatgagtgaaggactgtaatcataatatgctcactacttgctcttgtttttgttttaataaactatagtagtgttttaaaaagttaaatgaagaataaacgcaaatataaaagc

SEQ ID NO: 16109 - DNA, 95 bp, Homo sapiens
tcccacaggagcacctcaagccatgaagtgtcagctggagaacagtggtgggcatggagaggatatgacatgaaataaaagatccagcccaactg

SEQ ID NO: 16110 - DNA, 654 bp, Homo sapiens
atttgcatcattcaagcatatcttgtaaaacaaacacatattatgggactaggaaatatttatctttccaaatttgccataacagatttaggtttctttcctttctttgaaggaaagtttaattacattgctcttttattttttccattaagagactcattgcttgggaaatgctttcttcgtactaaaatttgattcctttttttcttatgaaaaacgaactcagtttaaaagtatttttagctcgtatgacttgttttcattcattaataataatttgaaataaaactaaggaaatggaatcttaaaagtctatgacagtgtaactctacagtctcaaaatgacctgataaattgataagacaaagatgagattattggggctgttcatattatgattcagaatcattttctattgtggtattataggttggttaaagtgatggcctttttgatgggttttgttgtgtcttgtgaacaagtcgttactgtgtccattattggaatggaattatcactactgtatcatgagtgggtattttgattctatggttccctcagtattacatcttgacttgtaatcaattatgaatatttcttgatatttaatgtataggacatttatttatactcaataaatatttttcaaaagga

SEQ ID NO: 16111 - DNA, 1178 bp, Homo sapiens
gaagatcatgatgcacttagataaaagaatgattaggtatagtggagacttatttgccagcagataaatcatgcccgttcccctctgcctggcagaatcacagtctcacatactgtcttgtactgacacatccaaagcatgagtgtgtcagaaatcccttgtctattcctgtctgtataaagtgtttcattatgaccagatctctgattgtatggtcactaggtatgcaatcacgcattcaaagaggctctttacaccatcactgtgattgctctgagagttgagggactattgggctttatttggacaaaccaaacttttagcctgaaaccaactttatgccactaagtcatagcctcagttgtcccagttatttgtcctcctgaaaatgcctgaaacatcagacagacattgcttgctttacccaaactgatcaaaatctttaggagcacaaatgaattttttagtctgaaataccaaataatgaattggtataccatatccggaatcacacatgttatcttaaacccagccatcatacctaagtcttttgccaaaacctctcataggtatatctagctgaacttattttggcattttcaatgtgatcagttctagacctagaagggggtcaggctgctttacagaattctatttccttaagtccctggcacttctcataccacatcactgaacctgttcagtaacaatcagtttggccgtcccccatgatggtaggaaatatagagagcaagttcttctgccagggtcacactgtggtctctgaactgaccagtatatccctaactcctctttgatagagaaagagtctcaaatggacaactgtcctgtgttgctttccctaggccttcagcagcctattggctctccctgcctctgagctctggactctgtttgaatattccaagtagtatatggacagtccagggcttatgcccagcagcccactggaggcattcttcaggctcctttaaggcaggtgcattgatagttccattagtgtgacccttgcattggcacccctccagcctggaggccaggcttccagcaacttccttctgccctagagcaagccatgagccccagagcagtagcaggagacttgagaagtagagtgacaaaaacaagcacttaattaaattataaaatttaacttt

SEQ ID NO: 16112 - DNA, 981 bp, Homo sapiens
cagcacaattcacaattgcaaaaatgtggaaccagcccaactgcccatcagtcaacaagtggataaagaaattgtggtgtatctatacgtaccatggaatactactcagccaggaacgaaataatggcattcacagcaacctggatggatttggagaccattattctaagtgaagtaactcaggaatggaaaaccaaacatcgtatgttctcaattataagagggagctaagctatgaggacgcaaaggcatgagaatgatacaatggactttggggactctggggaaaggacgggaggcgggtgagggataaaaaactacacactgggtccgagcacggtggctcatgcctataatcccagcactttgggaggccaaggcaggtagattatgaggtcgggagttcgaaaccagcctggccaacaaggtgagaccccccccatctctactaaaataattagccgggcctggtggcgcatccctgtaatcccagctactttacttgggaggctgaggcaggagaattgcttgaactcgggaggcggatgttgcagtgagccaatatcgcaccactgcactccagcctgggcaacagagcaagactccgtctcgaaaaaaaaaataaattttaaaaactacacattgggtacaatgtacactcctcgggtgatgggtgcaccaaaatctcaaaaatcactactaaggaacttatccatgtaaccaaacaccacctgttccccaagaactattgaaataagaaaaaagaaaaaaaaaaaatcactgattgcaggtcaccctaacagatataataatgaaaaagtctgagatgttgcgagaattaccaaaatgtgatgcagacacgaaatgagcatgtgctgttggaaaagtggaacagatagacttgctggagacagggttgccacaaagtttcaatttgtaaaaaatgtgatatctatgaaatgcaataaagtgaagtccaat

SEQ ID NO: 16113 - DNA, 64 bp, Homo sapiens
ggccagcttgatgaaaaaaaaaaagcaatcaagtcctggaaacactttcaacctagagtagttg

SEQ ID NO: 16114 - DNA, 50 bp, Homo sapiens
agcccccggtccctctgcagtctctataccaataaagtggccctgctctc

SEQ ID NO: 16115 - DNA, 3164 bp, Homo sapiens
cgtgctccttcagtgcccctgtactgccctgccatctcaggccaaagggaggggagcaagtggggacctggccatggcccctcagcaaaaacctattcacagcgggtggggaaacacacacagctcctgctgactccccttatggatctcagtttgctcctttttatggacctttaatggagagagagtaaccctccacagaatgtctgaattcttgcattctttacccttccatcactatattgattctttttttaaaaaatatgaacccaaactcccgcctcacttcgtctctacagaatgttcacagcaaaacacgtttggtctgtttttagattcttgaagaattcaatagtctttcaagatgtttaatgtgtttaaagctgggaacctgttgggagttcacaagtgctgcatatactgggtagcaaaagaaaatggaaaaaaacccacaaaacaaactttaaaaaaaaaaaaaaacaaatttgccaaggtttagctgctcatttacattagtgtgtgtgcattcgttcagccccatggtggtgaattctgtttctttcctttcctaaggctgggacatggtgggcatcagggactttgtgctaagcctgatgaaatgtgctccttcaatctccatgaaaccatcgtaacatggaggcctcagctgctctgaggagagaaatcagactttgttttttgaaatcgattgggatcgaaagcctgaaataaatattcatactttccatagaactgagcacttggttgctatttattttaaaggcagggttatttccccccagggagtggggcaagcggggaagttgggatgagtgcgtgtgggagcaaagagttaaaaatcactatgctaagtttggttgatgctactggggggaaaaagttgaaactactggtgaccactgttgggagaggaaacatctgttttatagatttagcatggccttcccatcaaaaatacactcgtaccatgacgttttgtttttgttttttaagtagccacttttaattactcagtattaatcctaggtgcatgtgttaagatttcggttttcatcgagctgcttatactgatagtgaaaaacttggatgtgtgtgagacgagttaccgccttcttcattggatgtgatctgaactttttttctcctttcaacatacttaggctgtggagtgcaagcagaattatgcatagaaattgtggcagggctgagggagttgactgcaggcagtttttaggccagataaggctagatcttcctgcaatgcacttgctgcagctttgattttccagatctcaatcgtgttgcttcaatcaatattgagatccagcagccttcaccatccaggagacttcagaacttgaaggtaatttttggttgttatgggggtgcaccagatcataggagggcattatttggaggaaaccgctataatgtaaaatcagatttcagaaggaaaatgcagcaaggactgactgtagtcctatttcagacccctgggcactagtgtcaactcctcctttggctcgtaactcagaaagaaccaaagggcagattagggacggggcaggagggatcctaggatggccagagtaggtgacgcttacttccttagctcctccttccattctgatctcagggttttcactcttcaaactcccaaacacatgacttcttcccagcagcccttcccggcctctaaagtttggtcccagcagcccttcccagcctctaaagtttggtctggtatgaaatgggactgtttaacaagcaaggctcttaggggacactgttgagcctggtcccagaatctgtgatctccacagggccagggttgctacttgcacccagaatctagtgattttagtcagatccatggaacagagcagcttcgtaatacattgtcaagttacctgattacaaactctcatagatgttggaactacctttttactccccatactttgtaagtaatgcttccagattaacctgcaaatcttgtggagccaaagcctctcacagtgctgatttacctcccccaaaatgcccccaaacccccatgcaagtttacagccagtagcttggtcttattctcttggagccctaaaattaagcctttcattcccctttgctaaagcatctcactcccagggcagccccagcaccctggcattgcgggaggtgctctgctgcacagctgttccatcaggccctattggcctctgttagacattgactcagggagccggagcgccaagtggaggttgtacctttcagccctttggggtgttaaaagtgtcaagggctgggtttgcctctgatgagtacaatcagttccagaagactgggtaagtctcttgctagcaggtggacattctggtattttagactgactgaacgaaacccagaggctggttccagagctctgtccctgagaacacatccctgtggaaaatacttgagtttgtaattttttttcccccttctgggagtggaggtctcaggctcaatccggaaccatgtacgtacagttttgcttattatttgatgtgacatgaactcaaaatcctgcatttttagattccttttagttctaattgaggcctcactagatgctcttcagttctgtgtattttgaggctgggtggagaagtatatgattctgctgttgattctttcagtcttccccccttctccttttatcaatcattccagagttattttctattagtcaaacttttttgtagaaccttctttcccttaccctggcaaattgcttctttacttgctggtttccttacgtttggggcacatgttgtaagaaactgattggaaggggaaatgtgcagctctccactggaaaggaactctccacccctcccatcctgataaaacaaacaaggtttacatttacaactaaaaggattcagatgcaattttcaactattctgaaaccagcaggacacacctgactttaatagttttagctgaaattgtagatgttttgcttcagtttaacttatgagaaaagattatctgacggattttgtgttgacttcccctttagtggtttattttgtctttttctgcccatctgtctactaataaaatgtgaaataaaatacctgtattgctacttccccatg

SEQ ID NO: 16116 - DNA, 990 bp, Homo sapiens
gaccaggccctgcctaggccctgccgcagaaccaccatccctgggaggccctgcagagcccacctgtggggaaagagaaggggcagcttccggattttcttttgggggttagaaggtcaggtgtggagactgctcgccagtctctgtgagcctaggccctgagctggggaggtggggaagattcgggcatgtgagtgcccccagaactgtcctggctccttccgtattaaacgcatttgcattttgagaagtgtccttcccacttcagccctccggagagactaccctagtctttctggggtgtttatgtcctcagctgaagcctggcctagttgctgagaggggctggggagatggggcgggagggccagactcagtgctgctgtggagctaggtgcttcccccttcccctgagactggtggactgaactccagtcaagttgagttcaagtgaaagattcttccagggttttattttttcccctcctaacaaagtctcatagtgttaacactggttctgcaatatctctgaggtgcaaagaatgcacttttccctatggggcccagagtttgccttttctgccaggcagtcaccatgcttccctaccccagcctgtttcttttggcttggtttggaccacagtcctctgctacccagggttttagagcccctgctctaggaaacagtttaagaaatcattggccccttcccagcacattgaatgggtaagcagacaggccatgatttagttggccagcactaactccacctctgttctccttgaacagcttcccctccagcccactgctttaggatgacacaatgaataacacctagtcatagaaatcagtctctctggtttgttttgtattatgttgtacatcattaaagatctaaatacaaaggatatacagtcttgaatctaaaataatttgctaactaactattttgattcttcagagagaactactaataaaaatctaaaaggt

SEQ ID NO: 16117 - DNA, 257 bp, Homo sapiens
gctgactggagcagagtcatttgcttcagcaggatccttgtgggccttctaagatgaagccaccctcaggtccagggaaggttgtgctggtatttggctcatgacagccaagagcagatttgtgaaatcggctcaactcccaggtgagagcaagcaaaaatcttggctgggtggaaaggaaggcaaaagagtaaaaattaaaaaggccaggcccagtaagtgtaccttgtactttataaataaacctcaagcagctc

SEQ ID NO: 16118 - DNA, 227 bp, Homo sapiens
ggggctggcctcagtctctgtcccatcgcttgaatacagtactcctagggcttgaccctggtacccagcccagccttagcacccagcatgtgaccccactcctgatcaggtcccagcatcttcccttcttgttctgttccttaaggtcccagcaccttaccccaggacttggtcttcaaccaccattacccctctaactttgcacaaataaacctgtgtagaaaccc

SEQ ID NO: 16119 - DNA, 125 bp, Homo sapiens
ccacgccgaccacagggccttgaatccttttttgttttcaacagtcttgctgaattaagcagaaagggccttgaatcctggcctggaatttgggcagatatagcattaataaaactgtgcatctc

SEQ ID NO: 16120 - DNA, 388 bp, Homo sapiens
aggacccaggagggcttcggcagattccacctataattctgtcttgctggtgtggatagaaaccaggcaggacagtagatccctatggttggatctcagctggaagttctgtttggagcccatttctgtgagaccctgtatttcaaatttgcagctgaaaggtgcttgtacctctgatttcaccccagagttggagttctgctcaaggaacgtgtgtaatgtgtacatctgtgtccatgtgtgaccatgtgtctgtgaggcagggaacatgtattctctgcatgcatgtatgtaggtgcctggggagtgtgtgtgggtccttggctcttggcctttccccttgcaggggttgtgcaggtgtgaataaagagaataaggaagttcttgg

SEQ ID NO: 16121 - DNA, 214 bp, Homo sapiens
gtgactgccattggtccctcagcctctgatcctcacacatgctctgatgcccatagaccacattcatctccacccttcatgactgcccgctgaacctgtctgattctggaactacctccccatacctccatcccccatgccccacttgattttaactgattcctctcctgaccctttactaataaaccctttggcggagactgagataacccac

SEQ ID NO: 16122 - DNA, 1172 bp, Homo sapiens
gctctgccccagccagtccagagcctaccacagcaatacccccaacactcactccactcaatgtgcacccagcttgatgtccactggacactggcaactttttctaaaatgcaaaaaaaagccactggttttcaggaaaatgttcctgtccctgaccccttttagagctgggctgcctggggggagtgggagggaggtggggagagctagcccaggccaggggtcaatgttcatgtcactagctttcaatccagtttccactgcagtggctggagagtgacctgagtgctacttgaagatatgtagagattccttatccatgcctgtacatagcatgtcctcctcccctcagctttgctaataccagtcccctcccttccctttggcttcctgctgttgggggtggaaaagactagaaaggacattgctttctcagccccacccccaggtccacagtgtccaaggtaatggcacacatattcatgcacaagaagcactcacctagagctgtctgtgcctctctgggagaaaggagagaggataagaagggaaagttcacaacctgtgaacagggacttgagcacgagacacttttcatctggagcaggggggtgagctcctcagcagcctccgtaacagctgccctgcctacacctgcagagctggaggttctgtcctccctgctgctctcaggagtgttcaagggtggagggcagggaatggggcctgaggtattaaggctaagaggtgggggacagggcccatctaccagccttcatcaggaagggaaagggctttggggtcaggtggcagctattccccaccaagagattcagggtcacaggtttttccccacacctctgaactcagggcctagccacccccaaacttccaaatcccacttttgtgatatgtgaagctactcatttcttacccttggaggctgtgtggggaatttccagcccttttatgcctgtgtgatcccaccccacccccatagttgtataaaggtcatagtgaagaagctgggggaagactgcttcagccagatcctggggtggggtctttaggttttctcactttgacaacccccgaatgtttttatagtagtttttttgtatttttttgtaatgacagtattatgtaaaaaataaagtattttaaaaatatgg

SEQ ID NO: 16123 - DNA, 121 bp, Homo sapiens
agaaaaggctggtaatactagcacttggtatgccaagacctgaagccaaaccagggggaaggtggggatgtggagacaagaaatggaaattctaataaactagctgaattagataaatccc

SEQ ID NO: 16124 - DNA, 1301 bp, Homo sapiens
acaccttcgactcctgtgccaatcaggcagcagcaatttcacaaatcagggccagtgggagttagctgtgtaaccggcttagggtctttgcagtcaagaggctgaccccttcagttaaagatatttaaggaaaaatttggggtggtgataatatggcttttcacagaaagggtcatgaagccctggcccaacaggactgtggtactaggggctgggatgtggggttaccacatggagagattttccattaagagagaaggacaaacatttctgagagtgtcagccattcttggtagacacctctccactcctcatcccacctctacccatctccatgccacaccttatccagttagacacatacataccaatcattagaagaacaagtttagaaggtgtggaacttgtgcctggctggctgggtagtcagctgagcctgttgctgagcccggtggtctggattggagtatggccagggcaggagtacacagaatagaatttagactgtcccttgagtagaatccactgattttctgtggctccagtgagaacaaggctttgaaactgaacaagataacttctagaaatgaactgtactaatccctttccccagattgtatcatgagtagaatcaggttcacgtggtgcttcaaagccctgagaagaatatttctttggaccccaggcactaggggccacctgcctgggagtctccctgcctcactcctctaggcaggggagtgatgcttcaggacgtgacaggctgttctaacatgtgtctacctgagggctagttgaaggatccaggagtattttcttcttgggtgggccctgaacaaagccaaaaattgtagaaaccagtctagaaaaagtcctgctcatctgtggccactgccttctagccgtcctccaccttgcagaaagaatctagcctttggtctctctctctctcatcggggtcatttgctattcccctctgatattcaaccctatagaaggagcctggactctgatccctctgtacaggctggatggaaggggccctccacacttcctgggaggtcagagacaaactgtttcagagagtcagatggacttcccaagacttgttgagagatgtgacatggttcttggatttcctctgtagcagcctcctggacttcctgaggactcgacattgtccacagatgtactggccattacatgaaacaagaaaccaagcatctttgctgttgttaattattatatgtgccattgttacaggagattataggctagtctgtaataaattatcttatagc

SEQ ID NO: 16125 - DNA, 510 bp, Homo sapiens
ggccctgtgcatgctggtggcctcagggaccctcataacccccagactcagagcccgagagcccttcccaagccattggcttggctgcagagtagactgagagctggggccacgtatccctgtgctggcacctgctccctgtgctcagtattaattacgcccccttaactgtcccagtgaccttgtccagacctccacccaggagagggatgggacacagcactgggctgccaggattcccctggcccgtctgggccaacccttccatgggtgaagacaagcaagtccccctggaggcgggtggcccagaaagccatctacagggttccctaggccaggtggagatgaggatgggtaacagtattggggccagatccctaagccccccagctgtaaataggctgtggccagtgcctggtcatcagaagagggaggaggagcccaggcgtctgtttatgtatttatttatttatttattatacctattaataaaaaaggtgctcagcctcc

SEQ ID NO: 16126 - DNA, 298 bp, Homo sapiens
cagtggagcccgtggtctcaggcctccaactttggccttcaggacaccctgtaagaacagagcacacttgctggacagtgccagttccagatgggctgaccggctcttctccccgtgtaggggagccccagcatggactcaagggacagagcacttccagtcgaccccccggctcgcgttcccgtggggatcactgaaccagacacagcattgctgacacatgagactaacacgtgcaattatttaaaaagatttcaataaaactgcctggctggctccgggccgcccctatccgctc

SEQ ID NO: 16127 - DNA, 130 bp, Homo sapiens
aggctggatcttggagaatgtgagaagccagccagaggcatctgagggggagccggtaactgtcctgtcctgctcattatgccacttccttttaactgccaagaaattttttaaaataaatatttataat

SEQ ID NO: 16128 - DNA, 281 bp, Homo sapiens
atatgaggatatgtggggggtctcagcaggagcctggggggctccccatctgtgtccaaataaaaagcggtgggcaagggctggccgcagctcctgtgccctgtcaggacgactgagggctcaaacacaccacacttaatggctttctgggtcttttatttgtacccatgtgtctgtcacaccatgaatgtacctggggaaatcaactgacctccctgaacatttcacgcagtcagggaacaggtgaggaaagaaataaataagtgattctaatgctgcct

SEQ ID NO: 16129 - DNA, 285 bp, Homo sapiens
acccccattctttccaagtcagatagtcttctgctgctggtacctgggtgggcaatggccaccatgtctgcacacaccagaaatggacattttcatatgcaatggaaaacagccacaaaaaaacctaccttatatggaagttgtagccctctgcagctcagccctgtacatatacctgtccctctctggcttggtccccttcctccctactttctgtaaatatctgtatctaaaccagaatattttggtcaaatataaaacaataataaaaaaagttctgatgtc

SEQ ID NO: 16130 - DNA, 41 bp, Homo sapiens
acaaaactgtttgcaacttaataaagtaagtttgggcctcc

SEQ ID NO: 16131 - DNA, 1406 bp, Homo sapiens
ctgcccacggaaagtgcagaatgctcctccacctcactctcctgccttgaaaaagacattcaggactgctggtttgtagttgaatattggccaaggaaaggcacatgtcacctctattcgccacacagtatttttttttttaatccgccaatattagtaggatttttgttttgtttttacaaatgttaaaatgtgttgttccaaatactaatgaaaacagaatgtctcttcctggtagaccactgccatatgatttacatttcctcaccataagggtcccccactctaaagcaaatttatcgctgggaaatgagatgaccactttttagaaagataattcactgtactatcaggttcacaaacttcatttcagagttctttttgaagtatttaaggttcccgttgcatttgttttgtttacagataattacctactctggctagaagctaggggtcccagtgaagagccactgccattaaagaatatgaaacatagataaaacatctttgaaattatgtaaattatgtaaattatcaggcaaatttgcattaaattacagaaatttaattcagaaccccaactactgtgttatgcaaaagcaagctgattaaatgacactcatataattatatgttgtaagcaacaggctcactggtcacggatttgtgtctgtgacttttgtgaaagggagaagtgacattgcatcaaagcatcttgcattatgcaatttttatattaaccagatatatattcatcggtattcatccaagttaaatgtagagtttttaaacatcaatctttaaaccaattgctgctacttatataattgccaaaaagtgaaataatgtgtagttcatgtaaataatacattatatttctattttattatgaagaaggtgaatagccatatttgtaaaatgacaatcatgtgtgttaacccagtgctttccattcgtgaaaacacatttgctttttgtgatatgcacaatgtagataagtgttctgtctgactttcttttttgatatagaagtataaagaattgtggtttatatatttaaaagtgtcaagctgagtattaaaatgtatgcatgttgtctaagaaattgaatactttgaatgtgtttcacagtttgaaataagctatttgatgtaatacttcttgtgtgtatgcacatgaacttagattttacatgaagtattttttcagtattatatgtaccctctgaaatacatagggatatgcgtattataccaaaatgttgctgaaaaatgggcacttaaagctttcagaatatgtcagtgctgatgtagcatgcttgttgcaattgccttttttctgtataaatgtctttaatgcaatatactggaaagcttttctattttaataaaaataatttttatatg

SEQ ID NO: 16132 - DNA, 1382 bp, Homo sapiens
cttgttaaatgtaatgggaaggtggcagacttaagaacgtggatatgaagtgcctagaaccaccacaacctggctgtgcgtctgtccctgtgggtgtatgtgcttgtgtgtgtgatgcatgtgagcgtctctggcacacacacttggacatacagttctgtgtgcgctcattcttattacaggagtgagcaaaggaagcatttaccccgatggttacctagaccacgattatttggattggggggaggggggatccgttttttttttttaattttttgttatttctaagcaaacctcttttgtacttttcttacttctaatatccatccctggactttttgtattccaaatgtttgtgatgctgagaagtgaagttcattttatgtgatcttcatgcgtcgtaatctacttttggtagataattaagattattaaaccctcatttaaatgtgacataaaatacagctttaagcacataaatacaaagcagcttccatcaggaacatggagcaggcagggactccattttacagaattactgagatttctcagttgtaaaacatgatgtcatcctgcatgcctcctggaattctccaatggggtcgccaaacaacaaatggagaaaaaaagttttacttccttgcattcttctacctttaaatagcaaagtaccactaccaccaccacctcttgcccccttccctcttttcttaaacttctggcatttcagagctcagcaggctacccctggtttctggagagttgggctaggcctgaagctccccctcccccacctctgctaggcagcccaggcctggtctgggagacagcccctcaccctgcctgggctcttggccaagcggccttggatggatgaagtcagagaggtggggtgagggtgagcttactcagggcccccagaggaagccctcagcctctgccctccccccacacagggcgggagcccaggcctgttcctggcagctgtggctgcagctgtgctcctgctccctcctggaatgtgcgacaagcccaaatgttccggggaggcggccggggcagggggcttagaagtgctaatatggttctgtgttttgcctgaaacgataccaggttcccctgaatagcaactttacaaggtccatgtgggagggaccaacccagatgccctgctgagtgtccctgaaaccatggcagctccatctgtcaagatggcaggggccggagtgagggggctgctggcttaacagcaggcatctgggcaggccagtcctcaaagcagctcctgaaggtctgtgttgcactgtcaccagtctcaagctatgcctctaatttcaccagggatattgactaagaagacaataaaatctttttctttgtgt

SEQ ID NO: 16133 - DNA, 54 bp, Homo sapiens
acattttaagtgggagaataagtaaatgcattattattcacgatttaatgagag

SEQ ID NO: 16134 - DNA, 284 bp, Homo sapiens
agagccaccctgtggaaacactacatctgcaatatcttaatcctactcagtgaagctcttcacagtcattggattaattatgttgagttcttttggaccaaacctttttgtctttagagttgttcattgtttgtgattgcatgtttccttccttcaactgtgttctccctggcattcagagaggagggagaggaggaagaggaaggggagggaagcttcccaagagtagcctcaacctgtgcttctgtgcattattctgagaataaatttctgtttcaaactgt

SEQ ID NO: 16135 - DNA, 344 bp, Homo sapiens
ttgatggattcttccatcctgccggatgagtgtgggtgtgatacagcctacataaagactgttatgatcgctttgattttaaagttcattggaactaccaacttgtttctaaagagctatcttaagaccaatatctctttgtttttaaacaaaagatattattttgtgtatgaatctaaatcaagcccatctgtcattatgttactgtcttttttaatcatgtggttttgtatattaataattgttgactttcttagattcacttccatatgtgaatgtaagctcttaactatgtctctttgtaatgtgtaatttctttctgaaataaaaccatttgtgaatat

SEQ ID NO: 16136 - DNA, 878 bp, Homo sapiens
gccgtcaggcagcctctgatgtggcttttcattgttcatttggcctttgtgtctataaccttctggcactgtgtttattatctatgattaaataaagtgagtttttggttttgtttttttaatttcagccattcctagagttactgaatatccatggagatctcaattctctgtgtccaacaggatattaggtaagaaagtacaaagataaacctggacttctcctattccaatatgtcatctttactcagaatcctagggataggtagaagaattcatcttttcaagaaagtgttttaaaaatactttgggaaaaaaactgcatcaaaggtaatttatcctcaaattaaatccttgcaggaagagaaattaacactaagaaaaagtcatcaatatttttcaactttttttttttttttttttactttggaaaggacaataactataaacctatatccagattttctttctgctgaagctgttgtcagaatcttcctttggacaaaacatcactagctgactataaaaacaaaagtgtcatcattgaagccctgaagaggcagggaattgagcttcagcaaaatacaggaaaagaactatccagtataaatgtcagaagacagatttcctaaacaagtaaaagagacatcaaaaattttaacataatcacaatgaaatcattttttaccacttttacagcggtgtttcaagcggactgtcactcagatctgcagagatgaatattactcaaaaaatttttttgttctcttgcatttttttcaactaccgcaaagctatacagatttttttgtacttgtggatcttttgtacttctcataacctaatgtcagactaagaaaaataaaatatctgagagt

SEQ ID NO: 16137 - DNA, 207 bp, Homo sapiens
ccaaacagtagagatggagggccgggaagcaaaccgtgccctggtattgtcagacacacccaggcttgatttggatccacaggcagagccaagggaaggtgtgattctctgaggaaagagtgattctgatatatgtacttgtcacattggtgttggacacatttgcgccaaaagtatggtaattctattattaaataattctctgag

SEQ ID NO: 16138 - DNA, 494 bp, Homo sapiens
acgcatgctttccagacagggcgttttggctgcatcacagccactggctggtcctattcatttccatttttatgtatgttttgaaaagaaaaggtccggggatggtggctcacacctgaaatcccagcactttgggaggccgaggcaggaagatcattgagctcaggagtttgaaaccagtctggacaacatagggagaccccatctctaccggaggaaaaaaaaaagagtcaggcctggtggtgtgcgcctgtaatcccagctactcgggaggctgaggcaggacgattacttgagcttgggaaatcaaggttgcagtgagctatgattgtgtggccacactccatcctgggtcacagagtgagaccttgtctcaaaaaagtaacataaggaaaaaagaagccttgctttagcacaggtatgaagccagaagccagcatctcaactgtgcttgtcttatgcagaaatataaagcgatggccaggttggacttc

SEQ ID NO: 16139 - DNA, 135 bp, Homo sapiens
acaggtcaacggcccaagggcctcctgccctgtcctgccttggacacttccctgagaagccccttccactctcccacccaccctcttcaaatgtttactatatagagtattcaaataaactgctgcttaatcttg

SEQ ID NO: 16140 - DNA, 1264 bp, Homo sapiens
tgggcctaagattgcagctgcgtggccaggtgctcacgccgtaatgccaacactttggtagaccgaagtgggcagatcacctgaggtcaggagttcacgaccagcctggccaacatggtgaaacccttctctactgaaaatacaaaaattagccaggtgtggtggcgcatacctgtagtcccagctacttgggaggctgaggcaggagaatcacttgaactcgggaggcgaaggttgcagtgagccgagatttcaccagtgcactccagcctgggtgacagagcaagactccatctcaaaaaaaaaataaataaaaaaaaatgcagctgcaggagtgaggcgcttggaggtaccttgacccaaagagcagggcagagggtggcagtggcacataggcaagtgtctttgcatgacatcttctcagagcttcacaataatgtcagggaccacatttaatgctttttaatctcccatagtgcctggctcacaggaagtgctcagatatgttaagtaataaaaagttaatgtggtgggtgcagtggctcacgcctgtaatcccagcactttgggaggctgaggtgagtggattacaaggtcaggagttccagaccagcctggctaatatggtgaaacctcgtctctactaaaaatacaaaaattagctgggcatggtggtgcgtgcctgtagtctcagctactcaggaggctgaggcaggagaatcgcctgaacccgggcggcggaggttgtagtgagccaagatccagcctgggcgacagagccagactcttgtctcgaggggaaaaaaaaaaaaaattatgtaacaaggaattagcctcaaaaccacatggctttggacgtgctaattcaacttttgtacatctatttgtgagagacctcttgaaattgtttaaatggttacatcaagagtttaatattcactaaactggcatcataaaattgtatgactttctccagccttgtctgatcatgctcgttgttgcccagctcagtaataagctttgcaggatccagcctgttctgacctatccctactgagtccccatagcattttgttccctcctgtggctcttaccttgttctcccttgcagagtatgggcatggagggcttctcttcctaatccttcctaatggtaggatcctaacaggacaaatctgtgtacctatctttctatcctccctgagcctgtaccaactagattcttcatatgtatttgtaacagattaaattggaaagcaaacac

SEQ ID NO: 16141 - DNA, 6158 bp, Homo sapiens
gcacaacttacatcaaataaggaactcttctggtgtttgacttaggaattgcttcaatttagatgaagtattttctttttagaagatcttataagtttgggtcaagatcctggttcttatgggtccatgaacacacttgtgaccttagtacttggtcatccagcatcatacaggcatctccaagttagactctatgcagcatcatcttttgcagcattcctctgctcctgctgatctgtgccactgaactccagttcttctggtcattttgcatggtagctcttgtcacgttccttccttcctcactctctatttctctttccctctccctgtccctctctttctttgtgtttgttgattttggtgtcaattttgtggacatttggcaggagttttgactggggtaggagaaacccatgacattagaattgaataaaacctagaagttggatattggcatattggttgttgaaaaataaatttcatcctcacttatgagtatacttggccttttaaagttactgttatgtttatctatattgagcacagataatggcattattcttataattgttaagatagtcttgcaacaaaatgtcttttaagtttcctgttaaaattataaaaagattttcatggtgagagggattttattgtgaaattctagaaaaaaatattaccacctctctttgtaatttactttacttgtatgaatttaacatctctagcatgtatccttacttgatattttgttcctatcaacagcattagaaaggaaaggagacagaatgagctttggttatttctattgcacagaaaaggatttttaaaattagattagtataatatctggccatagagtgataagaacaatatgacttagattttctgtatttcatctgccagattatttgaatcacacaggatgatgtgttaacagtattagggtggaagaggaatcaagagtaaagaggtaggggtttactcatttttcttccctgagccaggtgtgacaagccaactctgtcaccattcgtgaggggagagttgcagtcctcttcaagctgttatcataagtacagtagtcagctacttggatatcaagactaagtgctgatatgaagacttgcctttgtgttttgttatgaaacacgcaagcataaagcaggactcaagcacaaggctgactgttctactttgaataacagcttccttgcagtctcctccacatgggtggtactgtgtttagaagggattaccaaaggctggagcgatttaagctatgcactagccttgccctcttaggttgcattctctttaggccactggttctcaaacattagggtgcactgtaaccattacagagcttgtgaaaagtgcagaaacctgagcctcaccttatgagattctgattcagccagggggaggacaggaatctgtatttttcatagcaacctcaagtaatctttattctgagggtctcgggattgcaggttgaaaaacacaaccttaatcagcagtaaattcttctctactcggccaggcgcagtggctcatgcctgtaatcccagcactttgggaggccgaggtgggtggatcacaaggtcaggagttcgagaccagcctgaccaacatggtgaaacgccatctctactaaaaatacaaaaattagccgggcgtggtggtgctcacctgtaatcccagctacccaggaggctgaggcaagagaatcacttgaacccgggaggcagagggtgcagtaagccgagattgcaccactgcactccagcctaggcgacagagcgagactctgtctcaaaaaaaaaaaaaaaaaaaaaaaattcttctctacccatttgggcttaagacaattcccagaaagtgttttcattatttaaaaaataataatagtaaatgaaagcaattttagaggtggaaaataccttagaatggaatcatttgcattatttgacaaatgagagaagtgacatgacttgcctaaggtcatcctgcaaagttagtggcagagttaggacttgaattccagtcttctaattccttggtcagggcaatttctactgtgttatgctgtctgttagaaataatgacttatggacactttgtctttaagttgtattattgtaaatacccttaaactggccaatagattttagaaaggcaggcatgggagtagatgctgagaattctagccataagaagaaaagtattttaaatcttacagaaatgtttaaacaacccaaaatacatgaataaaaatgacatttctttgtaggacctgccaactaactattcacacacatttatagaggttataaggatcttggctctagaacaaatttttgaaattagatcattttaccatggatgttaacaaaattggaaattttttgtcactgagaaaattatcacaaagcacagtaaatacatatacttaccatacattttgtaaaaaacacattttttaaagaaaatagggatgggtatggtggctcacgtctgtaatcccagcactttgggaggccaaggtgggaggttcacttgagcccaggagttccagaccagtctgggcaacatggcgaaaccccatctctaccaaaaatacaaaaattagatgggcatgttggtacacgcctgtagtcctagctactcaggaggctgaggtgggaggatggtttgagcctgggaggcagaggctgcagtgagccaagattgcactattgcactccaccctgggcaatagagccagatcctgtctcaaaaaataaaaatagactgggcatggtggctcatgcctgtaatcccagcactttgggaggctgaggtgggtggatcacttgaggtcaggagtttgagaacagcctagccaacatggtgaaaccctgtctctaccaaaaatacaaaaatcatagccaagcgtggtggcaggtgcctgtaatcccagctactcaggaggctgaggcaggagactcgcatgaacctgggaggcagaggttgcagtgagccgagatcgcaccactgtactctagcctgaccagcagagcgagactctgcctcaaaaaaaaaaaaaaaaataaaataaaataaaattagttttggaggtgaaaacacccaaactgttattatttaaaaatacctaccaagtactgtggtcatattgacattcaaaagaagtttcataaatcgtatcaactctggaaagagttcatgtcagatgctagaccagcaagttacccaactcaaaattcagccaatgattctttactatagagtacctatcatgtgtcaaataatatacagacttcactactaaccctcacaaaaacttgcagggtaggtggaatgagccccaatttaatttggaggtaatagtgggtcagaaagattaaatgacttgccttaagtcatagagttagcagtgagtggcagcactgggattcaaacccaggtttgtgtcttgtccaaagcctgtgcttactgctttaccattgtgctctttagtttgtaaagtatggtaagctggcctgttatttgtttagtatcttctggattttttttttttaattatagagctagcttaccgtgtgtatcatgtaaaaaaaattcataagattaacaatttccatgagaatatcataaactcagggcacacattctggccattcctgactaaaaaacttcaagcagaataagcagctataaaatagaaaagaaaaattaaggataaacggcattgtgaaaaaaaaccgagccacacagatgagaattaaaaattaacagccagcaaactcaaaagaacctttgtcctccttgagatatggtgatgatcaaaaagttagcaaggaatattaatcaaggaattaaagggcattaggaatgctatagtattggaagaaattacatcttaacatttcaaagccccatttcacttaagagtaaaatctaatctgatgttttttactctgaattttattcagtaatttttattcataattcatgataattggtaatgtagtataattgttagtaaatgcagtacaaattgttctactgttttaaaaagttttccgcagaacagtgcatttatggcaatgctatgtttaatgagttagggacatcaaatatatagtagttccttattttcagttgtgaaaatgaaatggctaaagcagaagagacgtctattttagtcttttaaaaatgtgtgtgggtggtcttttttcctcagaagcccaaagcacatgtatattttgttatttctccttgctatattcctgagactatactaaaaactttaagaaaaggaacaagaaaaaggtaaattcatgtgttccccactgctgtgtctagaaccaagatcacattatatcattgttaaaattgtgttatctagaaagtgcaatatagggaaaacactctaagaatcttttaaaagcctagtgtttcccttatttgtcagaatatgtggtagtggcatccataagtatcttttaacttgcatttagcaggacaaatagtgtgatacttatactgatgacaatcatccccatttaatgaccagcagtcactgagcgctgtgaaaattcactcagtgataccccgtgttggtcttgaaggaaaccgtacatatgaatttttggatagctaatgtatatctctcaagtgccaacatttaaaacttgtaattatttttgatgtgagtatttcaggtatgttagtataccttcctgccttcttcttaaacatcatgctcagtataattcacattttcatgatgaaaagttaaagttatattcataatgtattattataagtatccagctctgatgtatgtaaaacacttcataaaatgtaaagggctataacaaatatgttataaagtgattctctcagccctgaggtatacagaatcatttgcctcagactgctgttggattttaaaatttttaaaatatctgctaagtaatttgctatgtcttctcccacactatcaatatgcctgcttctaacaggctccccactttcttctaatgtgctgttatgagctttggacatgagataaccgtgcctgttcagagtgtctacagtaagagctggacaaactctggggggacacagtctttgagacagctcttttggttgctttccacttttctgaaaggttcacagtaaccttctagataatagaaactcccagttaaagcctaggctagcaattttttttagttgcaactaagtaagatatactacaaactaaggatgctgctagactaaggaataaacagcaaggtaccaaagtacagcaaagcaacaacaaaggctctgtatttgcagaggggtctatcatgcttttaagaaaaaagaagagtacaggaaaaaaattcagatagacataagagtattttggatgccattaaactttgtcaataaccattaaaacataggcttaaattatcacgtattgttacaaagacacagttttgtctcattataaaataagattatatgaaatttatattctagaaatgattccaaatcatgtcctaagaatttctcccattcaaatgataatggaaattactgtcaaaaggaaaatctcaaagttaccattacgctgctctcttgtaaatgaactagggataaagatatgggttttatcaaaagccctaaggaatatatctcacattcacctcctatatgtatgtgtatatataaatgccactataaatgaaaatgtcacccagagataataaaataatttttaaagtttaaatctggtccaaagtctttaaaataggtagattttcagctttcttaagtttctccctcatttagatttcatggtttttacataaagggtgaatatttgaattttcttttaaatttcactgcatcttcaattgcccaactgtgtttcctgataaattttagattcacatttttaggaaatttggagtattccagacaatatactagatacccagaaacttttctcagtaggttctgaggtgttttaagttcttatgctagactgtaagctccttgagggcagagactgttttatttattcttgtatcctcagtgcctggtacaggacttgacacagagtagttgttcaataaatatttgttgaatgaatc

SEQ ID NO: 16142 - DNA, 1356 bp, Homo sapiens
gagcagctgtcagggaggcccagtcacagtccagcaattccacaaccaccttgacgaatgcttgccaagctgttttaaagccaagaacaccctttctttgttccaaattaactcttagaagaaaccccacaaataaagcaattcaatcaaggctgttctatttaaatcagagatggggaccaggctcagagttctacctatctaacccccaaccacagcccccttggtggcccatgagttgcttccatgaaatcttaggagtctctggaggacagattaaaaaccagtgatctgtaatttgtagctcttcctgctgatccaaggactttcccatgggtgcgcttgatggtttagtggatcgactcaactcagaacacaagcttggaaagtgttaggggttttgaactaggtggatactaaatctcggccccactcttcattggcttaacctaaaaaccagaggtgcttttccttgtctgtgtgccagttgctggctgttttagttgcttgcccttcattttgctactgattttccttaatttgtgggaaggagtaggcaaagaatatgcttacatgattacacctgtaaagtaagcccaaacatcccaaatgtccgtcaactgatgagtggattaataaaatgtttccatggaatattccttggattactcagccataaaaaggaatgaagtactgacacatgctgtgacatcagtgaaccctgaaaacatccttctcagtgaaacaagccagagagatgtacaaggctacagactgtatgattccatttatatgaaatatacatactaggcaaatccatggagatggaacatagattagtggttgccaggggatagaggagtaattgttagtgggcatgggatttgtttttgggaggttttgaaaatgttctggagttgaacaatagtaatggttgcatgatttggtaaaaatactaaaaactatggaattgtttaattatggtatatgaattaatttctttctttttttcttttttttttttttttttgacacggagtctcactctgtcgcccaggctggagtgcagtggtgtgatctcgtctcactgcaacctccgcctcccagattcaagcgattctcctgtctcagcctcctgagtagctgggattataggtacatgccatcacacctggctaatttttgtatttttagtagagatgaggtttcaccattttggccaggctgatcttgaactcctgacctcaggtgatccacccgcctcagcctcccaaagtgctgggattacaggtgggagccacaacacccggccatgaattaactccgttaaaaaataaacgtatacattctgtgagc

SEQ ID NO: 16143 - DNA, 150 bp, Homo sapiens
tttggtcagtcacaaattcttttttagccttccctggagaaaaacaagtccccaagaaaaaattcactctatgtagagaaaaaatattttctctcatgttagtacatgcagaacatttaatattccacaatatatatggttttttattca

SEQ ID NO: 16144 - DNA, 1378 bp, Homo sapiens
acatttggttctggatacatgttgaacttagttgaatataaaaatctagattaaaagtgtgtttaccatactgtataattccatttacatgaagcatccagaaaagataaatgtatagggacaaaaagtagattcatgtttgcaaggggctggggctggaagctggtagtgactgctaatgggcatgaggaatcttacagtgatggaaatgctctaaagttggattgtagagatggctgcacaactcagtaaatgtactaaaaatcttttaacttaaaacagatacattctatagtatgtaaattatatttcaacaaagctgttttaataaaaaaaggaaaaatgtgtttactatatcggcttagaaacatgcctcatttctaggaaataaaagatagaggtgagagatgatttactttgagaaaagacattgtgtcacctatgaaattttattaggcacagagtcatattttaaggtagatagttctgtattgctgaaatagtaattttaatgtctttatgttgccacatgttaagaccataatgtagttataaatggaaatgtttacacctgaagtgagtattttcaaattaaaatttaattaagtgattttcttcgacacttaattctagattccccagatgaattgaagtgtattgctgtgtcttgtaataccttgctttaactagctttttatgtattttagttggtatagctttgttattattcatattaacaaatctgaaaatatgtcaaattacgtgtttttatgaccatgtaatgttttaaaggcacctacttgttataaaatcataatttaggataaatgtggtaaaacttagcaaaactatatttggtttagttttcccactggtatttatagtttactttgaatatttatattaataattagctcataatttttattgcaaggctcaatgactgtcattggaatataattttgttcagtacaaagatacttgtagctgtctgtgatttacgagttaggcactacatctccattttcagactgaggggtggcaggcttcacatacagtgggaatggagtaattacaggagggagttgtaggagctttgaagtcagagagggaggtagaggcctttttacctagggcctcaaaggccattggaattttacttttattctgagataggaatctgttggaaggatttgaacaggtgattgaatatgttaggaactttgaggctgagttgagcttctgagatgattgaatgttggaatgaatctgttgtgtaagtaagagaataccaatttggcaggaagagaacatattctgcatccctcactgaattcagtaataaataaaaatgtgtacatgtgattaaaagaaggtg

SEQ ID NO: 16145 - DNA, 1378 bp, Homo sapiens; identical to SEQ ID NO: 16144

SEQ ID NO: 16146 - DNA, 429 bp, Homo sapiens
cactagaggcatttcttatcaaaaggattggataataaaaataagtttctactgggtatatttcaagcatttatttattactttagttacgaattccaatatactttaaaatggtatttgttttacagcatacataaaatgtagcaaatcagtactgtaaaacatttaacattcatacaattatatataatatccttttttttaaagaatggtatttcacaaaaatatcttttgaaattggctttggagtttacatatactgaacatgaaagtttataataatgatgatacaactttcaacattgtcattttttcttagaacttcagctgattgcagagatataatgattacattgttattaaatttttttaacacaagtaagtgtcaccattttatgacatgaaataaaaggttatgactgttattga

SEQ ID NO: 16147 - DNA, 879 bp, Homo sapiens
ggtatcaggcagtggcagagggctctaggctgacatcgctggctgcccctttgggcggagaggggacctcaccagtttttttagtatcgcccacgcccagttccctggccaactccgcagggccctcctagagccaggtgggagtggggagcgacccgcagctgctcactccaccttgcgcggcccatactgggcgtgtgcatctgaatcccgctggagagcaaacacgaacttctgttcgctgcaaaatggttagaaagaaacagctggattacgttcctctaaaaaccacctgaacgtaaccttcgcagggcgtcaagtcatcttttcttgccttcggttgtggcttctatggctgtcccgatttgcgcatttcctggggtactatgaacgtgagtggggtattttgttctggcattaaaagaaaaacaagcaagcaaacaaaaacacagcctccgatgccaaacatgttcccccttcttcacttccttggagctggaagtattattcctaagtctagtgcaaaatgcttctactctctgtgtcttcctgatagggatgtttaatgtaagtaggatattaatttcagaacattgatttcttatctgtgtgtctgacgtgccatctttaatgttaaaattaaggtgttaaaattaagcctagttatatagacgaaataaaatgctaagtcactacactacatcgtttattttctattacatctcattcttccctttctaaatggaactttttaaaacctacgttattttccctcaaacaatttattttcacaattcatatttattatagatagcagaagtaatccattttaatatggcctttaaaaattccaaatatttgaggttgaaaatgtcctgg

SEQ ID NO: 16148 - DNA, 1404 bp, Homo sapiens
atagaggaaagatcactcaccagggccaaagagagtgctcagcgggagatgcttcactgatgccttcttgctacctgtttgtgcctcttatgactttggaaaaacaaaagatattttgcttttgggggatagagggtgggtgggaaaagaaaaaaaatccatttggttttggttttgtcctattcctccaaatgcagcagggcctttagttgtctgttaaagctgcactataatttggtatctacattttatcacacaaaggaacctccccttttgacaacaactgggctaggcagctgttaatcacaacatttgtgcatcacttgtgccaagtgagaaaatgttctaaaatcacaagagagaacagtgccagaatgaaactgaccctaagtcccaggtgcccctgggcaggcagaaggagacactcccagcatggaggagggtttatcttttcatcctaggtcaggtctacaatgggggaaggttttattatagaactcccaacagcccacctcactcctgccacccacccgatggccctgcctcccccatcccatccccaacatccctgtaccaccttctctcacatcttctaaagctttgtacaaatcacaatggtgcacttccaacaaaatatatcaataggtgttttcctctcttattttgtaaatagtattattttagctattaagctggataccttctttcaaattcagccattcagttgtaaagttgggaagaagtttcttgacaagactctgcaattaaatgcttaaaatttggaggggatccttccttgattacatcaagtatgttggtacatgggtttatacaagttcctcttgagaaggcaaaaagaccaccatgtgtgagagctctttgacttggccaataggggcctatcttaatgcacttgtttggacacatttctgatcttatttgtaaaggctgcaaaaggagaggatgaaatgctgtaaaagtaggaaatgaagtggaagctggaagaaaatgtaattggtggtacagctatgggccagatggtggaggggagggtggggacccctgccggcaagcagagtgtcacagctggctttcctcacttgggaaaagggtactgccggtctagcagcctcctctgtactcagccaggacacccagcgcgtgggacctgtttgtgtctgttttgcttccttgggaacggcacagtcactcaccctgccatttgcggaaatgacctggtgcactttgactgttaagcaatgcgttattgctgtagtcaaggttagtgcaagcaaggaaacattcccagtaaggtatttgtttccattttctgtctgtgcttctgtcagaaacttgctaggacatttagtggccaataaaaaagaaattcctaatttcaacctt

SEQ ID NO: 16149 - DNA, 725 bp, Homo sapiens
gtgaaaatggtgatcacctaagcacatggatgagacgtgagcacagttatggcagagaagtttctccgcaccagaattatccacagcaacttggctgagccccactacacacagagaaatcatcaacctgacttaagagttttcaagatgtcaacttcaggctgatcagcagatgggatgtgaaaaatactaccctattctatcatttgctgttgcttgctgaactgtgaagaactgcatgaactatatttaagctgctttctgtaccattgccaatcacctttttggagttggaagtgctattttcctatggacttttgcattatttcattgtgcatgcatccagtgattatacataagcaacatatgtaatctgcttatatatttttaaaaatccatccacacacatggtaaattaagtataaattcttttgcaaaattatagttcatgtcattgaaagtttaaattggtttcatttaaagatcaatatactaggtctgccttcactttatagaaaactagcttctataaagattttttcactgtttactagtgaaatgagaaaagcaaagctatttataaaaggccttatgtcgtgtacatacattgtctttgaaatatttgtgatctagtttattgcttgtaaaagagaaattatataatttatttagtaaatactactgtaaactatagttttgtgagagaaataaaatattttgttctc

SEQ ID NO: 16150 - DNA, 2665 bp, Homo sapiens
ttcactcatcctgagactttctttttgcagtggagagagagaataatctagttggggcaaacactgaactttgtcaattaatttgaggctatttcctatttgaccccttttcttttttgaaattccctgaaatgatgttattctagagaacttctatgtcaggttcctttggatacccttgaattcagtgtagtaatattttcagacgtttccccaataagtgtgttgaagcatacatctttacgctgctaatatgtctaaatacatatgttatcccttgatttttttaaataactgagagctctatttatttatgggattattaagttctgatgaaaatataaatgttgacttaatcagcatagtaaactgatgtttaaaattccatacttcatgcccacactaatttttaatgttattttcagtggttgccgatttccatttgatgaagaactatacagcttaaaaaaatacgttagttatatctatctagtggttgtctgttttacccaggaattcttggatatttagttttctgggtactgaagtggatgggagggggaatgattaaagaacaaattataaaagtttgaacaaatcttttcaaattaagtatataaaagtaaacttttaagaaaaacatttttaatgagattttaatagtaattctagtcagtcatacaactataactactatagagaaaataaaattttttcctttttttttttaaccggaaagtgcatttgcttgggtgtaatcctaaagtgaaatgggacagtgccttgcagtctttgcccactatacataggctaaggctaagctctttgtactactgcaaacttaaaagtttttcaaatgtgggaaacgtgtgggaaggcttgttgaactttggcgcactcaggtaaacaatactctctcaattgttgatatactttaaaatattcagttgtgcctcagttccagaaattattgccaaacaggagccacagcaatttttggctacttttctgctctgcccatctgtcaccttactggttttcccttgttcaggaaggaagcagctgtttccttgccaacaggtcccttcctctccatctcccaccaaactagggcaccattgattagacaaaggtacagtgtaacttgggtttctgacagcaacaacaggactgtgaattgtttaacctctgtggttaaagctacagcttgagttgactgccttggggatgtcagttaattaaggggtgatgatttgcaagagaaaattagtggagagtcacataggtaaatcattatttaacttaggttttcctaaagttagaatagtcgaatgttcttttctttacctttacaattaagacaaaatgtttaataagaatagcaaaaatttttttatattatgcatccttatacctcacatatcttccttaactagatagtttgacagaaagaatggcatacaaagaggaaaggggaaaaatgactcagaacaagacaaaagctctgactgtttaaagttatcgcttacagagactttaacaattttgtggaatttttacaactatgagagtaaatggaactggtcaactcttgacagttgcctcaagatggagtgaaattgcatcgagggtaagactgtgtccacaggtttaaaattctctcttctgagtaatagtgttcatgtgctcccattctcgaccctgttgttgaaattcaaacttaaatagcctgacttcttgttgggtaacttgccctgcctccagaggtatttgaacttcattatcttcaacacaggaattgttaatcttctcacttcacctgttcttgcattagctcaattgatgtcatcactgatttcctaaactagaaactatggaagcatctttgacttttccttttctctgttggattagcttaatcaccaagtcctgtcaacttctgaaatgaatctcaaatttcttcccttctctatctgttgcccctgattttgccttaagttcttgcctgagtgatctcccagcctgtcttctgtctccttttggttcagtctttatactgcctcttgagtaatctttctgaaatttaaacttgatatttttcgccctcttgcttgaaaacttcacttgcttccccatttcctactctttaaggaatgatttctttagcctcagatagaaggacctttatgatctggccatattctgaaatagcttcaatcctctcctcatctctgttccagtatacatctttccttcttattctgcaaacattagaccacttgatattctttaaatatgtcatgtacttttcttgtgtctgttctttgggataattcctatccttttcagggaggcaaattgcacgtgagtttaagtatgaaggcaatgtatacctgctgattgtaaaatatttaaacattgtacatatctgtgtggttttaaaagtctgcttttaattatgtaaaattcatcttccctttccacagataacttctgttaacaacttgatatctattgtacaagatgtgttactggcatttccatgtatatatgtatataaatgcaggaaaccaacatgtcattgacacctctcttctttacttttccccatatctaatcattcctcaagtcttactgatttttatcagctagaatctatctcctt

SEQ ID NO: 16151 - DNA, 1324 bp, Homo sapiens
aaaccaaactggacttgtcttccttggcctattccggaaaagatgcttgatgcccagccccgttttaaggacattaaaagctatcaggccaagaccccagcttcattatgcagctgaggtctgttttttgttgttgttgttgtttattttttttattcctgcttttgaggacagttgggctatgtgtcacagctctgtagaaagaatgtgttgcctcctaccttgcccccaagttctgatttttaatttctatggaagattttttggattgtcggatttcctccctcacatgataccccttatcttttataatgtcttatgcctatacctgaatataacaacctttaaaaaagcaaaataataagaaggaaaaattccaggagggaaaatgaattgtcttcactcttcattctttgaaggatttactgcaagaagtacatgaagagcagctggtcaacctgctcactgttctatctccaaatgagacacattaaagggtagcctacaaatgttttcaggcttctttcaaagtgtaagcacttctgagctctttagcattgaagtgtcgaaagcaactcacacgggaagatcatttcttatttgtgctctgtgactgccaaggtgtggcctgcactgggttgtccagggagacctagtgctgtttctcccacatattcacatacgtgtctgtgtgtatatatattttttcaatttaaaggttagtatggaatcagctgctacaagaatgcaaaaaatcttccaaagacaagaaaagaggaaaaaaagccgttttcatgagctgagtgatgtagcgtaacaaacaaaatcatggagctgaggaggtgccttgtaaacatgaaggggcagataaaggaaggagatactcatgttgataaagagagccctggtcctagacatagttcagccacaaagtagttgtccctttgtggacaagtttcccaaattccctggacctctgcttccccatctgttaaatgagagaatagagtatggttgattcccagcattcagtggtcctgtcaagcaacctaacaggctagttctaattccctattgggtagatgaggggatgacaaagaacagtttttaagctatataggaaacattgttattggtgttgccctatcgtgatttcagttgaattcatgtgaaaataatagccatccttggcctggcgcggtggctcacacctgtaatcccagcacttttggaggccaaggtgggtggatcacctgaggtcaggagttcaagaccagcctggccaacatgatgaaaccccgtctctactaaaaatacaaaaaat

SEQ ID NO: 16152 - DNA, 828 bp, Homo sapiens
atgtctgagcacggactctcccaggcctgcctgcatggcatcagactagccactcctgccaggccgccgggatggttcttctccagttagaatgcaccatggagacgtggtgggactccagctcgtgtgtcctcatggagaacccaggggacagctggtgcaaattcagaactgagggctctgtttgtgggactgggttagaggagtctgtggctttttgttcagaattaagcagaacactgcagtcagatcctgttacttgcttcagtggaccgaaatctgtattctgtttgcgtacttgtaatatgtatattaagaagcaataactatttttcctcattaatagctgccttcaaggactgtttcagtgtgagtcagaatgtgaaaaaggaataaaaaatactgttgggctcaaactaaattcaaagaagtactttattgcaactcttttaagtgccttggatgagaagtgtcttaaattttcttcctttgaagctttaggcagagccataatggactaaaacattttgactaagtttttataccagcttaatagctgtagttttccctgcactgtgtcatcttttcaaggcatttgtctttgtaatattttccataaatttggactgtctatatcataactatacttgatagtttggctataagtgctcaatagcttgaagcccaagaagttggtatcgaaatttgttgtttgtttaaacccaagtgctgcacaaaagcagatacttgaggaaaacactatttccaaaagcacatgtattgacaacagttttataatttaataaaaaggaatacattgcaatccgt

SEQ ID NO: 16153 - DNA, 648 bp, Homo sapiens
accctggaagacagaaggccactccaaggggaaggatccctctcctctctgccatttcttggctgggagctgtggtccacctcaaaaaaaaggagcactctggaggacacgttttcccacctgttggctcccgtgtctgctgactgagggcattcaggagtaaatgcacaggtcggtccaggcccgtctgggtttgggatgcactgagttggaggttatgaaagctttgatcctcttcttcctctgctgggcctcgcagcattcccaagggtcacatgccctggcatgggcagaaactgggctaatgattctttgcccacttcacccctcgtgtctctctttgttgctaagttctttccctcttggaaggacagatctgccgggctgctatttatagttgcctttggcctttcactgctctgcgatttggcaggaaataaggcgattaaccctatgtgtccacaagcctcaagccttgtttcaggtcaccctcaaatcacactctctttaggcaaaacaggaaacttcttaagtgacaaattttaatgccagacatttaaggagaggattattgttgattccatttactcatgcttgcaaaactagagacccctaaggcagaactgagaataaacatgtttactttgg

SEQ ID NO: 16154 - DNA, 95 bp, Homo sapiens
aaataatgtatagaatcagcatctctgactaatgaaaaatggatgtagcagttgatgattttctatcttaataaatgcaatggaagtgttactat

SEQ ID NO: 16155 - DNA, 940 bp, Homo sapiens
gaaatgatctgcattggatttactagacgaaaaccatacctctcttcaatcaaaatgaaaacaaagcaaatgaatactggacagtcttaacaattttataagttataaaatgactttagagcaccctccttcattacttttgcaaaaacatactgactcagggctctttttttctttttgcatatgacaactgttactagaaatacaggctactggttttgcatagatcattcatcttaattttggtaccagttaaaaatacaaatgtactatattgtagtcattttaaagtacacaaagggcacaatcaaaatgagatgcactcatttaaatctgcattcagtgaatgtattgggagaaaaataggtcttgcaggtttccttttgaattttaagtatcataaatatttttaaagtaaataatacggggtgtcagtaatatctgcagaatgaatgcagtctttcatgctaatgagttagtctggaaaaataaagtcttattttctatgttttattcatagaaatggagtattaatttttaatattttcaccatatgtgataacaaaggatctttcatgaatgtccaagggtaagtcagtattaattaatgctgtattacaaggcaatgctaccttctttattccccctttgaactacctttgaagtcactatgagcacatggatagaaatttaacttttttttgtaaagcaagcttaaaatgtttatgtatacatacccagcaacttttataaatgtgttaaacaattttactgatttttataataaatattttggtaagattttgaataatatgaattcaggcagatatactaaactgcttttatttacttgtttagaaaattgtatatatatgtttgtgtatcctaacagctgctatgaaattataaaattacctaataaaaataatttgaaaatctt

SEQ ID NO: 16156 - DNA, 2542 bp, Homo sapiens
taaaagtaaagagagggaacttgggaattttttttgttaaattctgtttataagtatggctcaactgaataaaaggagattcactaaaacgaaaagcagttatttttggaaacctgcttttaaatacaaataggttgataatggaaactataatgacctttccaaaatagcagctggtagtaaaagttaagtcttcttcagtcttggttgaacttgagttcttggcactctgaccatgagtcattcagttctcatgttaaaatgtacttaatattacaaatcaaaggtacagtggaagaagggttaatcacaagaagttacttatatggtagccctgagctttaattgcagagtaactttaattacttttagagcctaaagatgactctagagcctaagtcctagtttctcccaatgttatatttaattttaaaaaattgatatgaaaatgtctaatgtatagtaataatttatgacagatctagtcatttcttcctattaaaaaagattaccttatctccagtaggaaatggaattttatgggcctttaaaagaaagttttatgaaacttgatgctataattttattggtatttcaaggggaaaaaagcactggggttcaaaaatggtagcagaactgctttgaaatgctgcaaggtggccactagatgatgcaaaatacaaccaaaagattgactgagaataaaattaggtgacaagggtttttaaagaataaccttttaaagtgtgggggcaggggttgcttttttttattttatttaaagtcaattatattttacatcttacatttctaaaagcattttataattatttttagtaagatttttcttaaaatttcatatactggtttctacaatttatatttgaaatttctcagtgttatgtaaagagtgatggaaaagcattgatttctttaaaaccgtaatgtttttagaacttaagcctatagggcctttcttacaatgttgatgtacccattatcttagaaaatctagtttaaactgttttctttcaccgcaaaagaattaaatgggaaaatcatttgtttatctctaagttatactaattagtagaaccaaacaaattatcttcttttaaaaaataaatcttataggaaaatagacagtccaaagtcatgtctttgaacagtggattggatctgtgccagtaatgacaaaattatttttttgacttgcttgcctgaataaattgaagaattgctttcagtttgggttttgtatattcttaagtagccattgaaatttatattcttaactaggtcaaaaaataatgagccataagtttatgtcctctcacttagacattttctctttaaaaaggtattttcttctttataaacattttaaaagagccttcccttcttaaactaactccagtgcatgaagtgtgaaaatattttaaaatgacatttttactaatatgagcaagtcatgtaaacattgaagaacttggtaacatattagtaaatggatattaccaaatgttttcatcgttaattactttgcgttccaccaaaatatctttactaaaatgtgcttggtgtagtttgtttattgtctaaattagtaccagtcatcttatttctgcaaaatgagtatcaatgtgaaaaagacacgtgaagattaagcatgtttgaaaataaaatggtcaattacatttcaatttacataggccaacaactgttccatactttgtttgtaaacatttaatttctctactggacaaaattaatatttggctttacattgaattttgagctgtgaagaataaattatgtatcattttagcatattaaacagtagtaagtctagcacatagtctcagccacttaaaacaaaagtttttttgtttgtttgtttgtttgtttttttgagatggagtctcactctgttgcccaggctggagtgcagtggcgtgatctcggcttactgcaacctccgcctcccgggttcaagcgattctcctgcctcagcctcccaagtaactgggacaacaggcgcgtcccaccacacccagctaattttttatacttttagtagagatggggtttcagcatattggccaggctggtctcgaactcctgaccttgtgatccacccgcctcggcctcccaaagtgctgggattataggcgtgagcccctgcacccggccaaaagttgatttttaattacataaaaatcgtaaaaacttctagtaaaaacttgatttggtgaatacagttatatttaaaaaccttaaggtgacaagcattttctatgcctaaatcttcattggtttgcctggaaagagtctctgttaaaagattttccatattcaaagtaaaaggaaagatttcttgctttctaattgtcttttggacacatgcctattttctttgaggtataaacctttagatgtgaaaaatgtaatttcattctgctattgtgtgtgcttgtgtgtgtgtaattgaaaaaactgggaaatcctgctttgttggtaataaatcaatatttttatattc

SEQ ID NO: 16157 - DNA, 611 bp, Homo sapiens
tatcactgtattaaaagtctgccgggcacagtggctcacgcctgtaatcccaacactttgggaggccaaggagggtggatcacctgaggtcaggagttcgagaccagcctggccaacatggcggaaccccatctccactaaaagtacaaaaaattagctgggcgtggtggctcatgcctgtaatcccagctactcaggaggctgaggcaggaggattgcttgaaccctggaggcggagattgaagtgagctgagttcgtgccattacactccagcctgggtgacagagtgagactctgtctcaaaaaaaataaaataaaaagtcaatttagaatgtgaaattctgaccaccttttggctttgagtattttccaaaagatatttgaaatcctaatgaggaaatcagaaaaagctatggaaaaatagacaaatttcatacatgaacaatataaattgtgtatattacttaacatcaaactaaacaagattcagaattgatggttgtataagaactagctcatgtaaaaataaaataacattattacattgcctcaaaaattggtcctcggtaagtgccttttgataaatgatctcaaataaatgactcatagc

SEQ ID NO: 16158 - DNA, 3881 bp, Homo sapiens
gaccctcgggcgtctacaaagttctcctgggattagcgtggttctgcatctcccttgtgcccaggtggagttagaaagtcaaaaaatagtaccttgttcttgggatgactatccctttctgtgtctagttacagtattcacttgacaaatagttcgaaggaagttgcactaattctcaactctggttgagagggttcataaatttcatgaaaatatctccctttggagctgctcagacttactttaagctcaaacagaagggaatgctattactggtggtgttcctacggtaagacttaagcaaagcctttttcatatttgaaaatgtggaaagaaaagatgttcctaaaaggttagatattttgagctaataattgcaaaaattagaagactgaaaatggacccatgagagtatatttttatgagggagcaaaagttagactgagaacaaacgttagaaaatcacttcagattgtgtttgaaaattatatactgagcatactaatttaaaaagagaacttgttgaaatttaaaacgtgtttctaggttgaccttgtgttttagaaatttgcacttaatggaatttgcatttcagagatgtgttagtgttgtgctttgccttctttggcgatgaatgtcagaaattgaatgccacatgctttcataatatagttttgtgcttcaaagtgtttgacagaagttgggtattaaagatttaaagtctcttaggaatattattcatgtaactccatggcataaatagttgtatttttgtgtactttaaaatcaacttataactgtgagatgttattgcttccattttattagaagagaaacaaattccatgctttatggaatttatgtagactggagtcttcgtgaactggggcaaatgctggcatccaggagccgccaatactaacaggacaggttccattgccatggcctattccacccaaacaatatgttgtagtttctggaaattccatactcagatatcagtctgctagaactttaaaatgaaggacaaatcctgttaaagaaatattgttaaaaatctttaaaccctgtgtattgaaagcactctattttctaattttatccagttttctgtttaactccttataatgtttaggatattaaaattttaggataatgaagagtacataatgtcctacttaatatttatgttaataggacttaattcttactagacatctaggaacattacaaagcaaagactatttttatgcttccataacctagaattaaaaccaaattatgaccttatgataaatctttaagtattggtgtgaatgttatttaaattctatatttttcttatttaattacaaatactataaatgagcaaggaaaaggaatagactttcttaatatattataacactcattcctagagcttaggggtgactctttaatattaccttatagtagaaactttatgtaatatagctaactccgtatttacagaacaaaaaaacacagttccccctcctgtagtataaattttattttcacatacttagctaatttagcagtaattggcccagttttttccctaatagaaatacttttagatttgattatgtatacatgacacctaaagagggaacaaaagttagttttatttttttaataaacaacagagtttgttttgtgagataagtatcttagtaaacccaatttccagtcttagtctgtatttccaatatttctaattcctgagccacgtcaaagatgccttgccaaatttctccccatttctctacggggctagcaaaaatcttcagctttatcactcaacccctgccaaaggaacttgattacatggtgtctaaccaaatgagcaggcttaggaatttagatgagatgtgtaagattcacttacaggcagtagctgcttctagcatttgcaagatcctacacttttaccttctttaagggtgtacattttgatgttgaacatcagttttcatgtagacttaggactcatgtgcagtaaatataaataagtgtagcatcagaagcagtaggaatggccgtatacaaccatcctgttaaacatttaaatttagctctgatagtgtgttaagacctgaatatctttcctagtaaaaataggatgtgttgaaatatttatatgtactttgatctctccacatcacttataacttatgtgttttatttctccaagtgcggtgttcctgaatgttatgtatgcttttttttctgtaccacaggcattatctatacctggggccagattttctgcactttgaaatgttgcctttgcctaatgtaggttgactttctgaattgtggagaggcacttttccaagccaatcttatttgtcactttttgttttaatatcttgctctctgacaggaaagaaacaattcacttaccagcctcctcaccccatcctccaccatttccttaatgttccatggtattttcaacggaatacactttgaaaggtaaaaacaattcaaaagtatcgattatcataaattcacaaaatatttttgcaaccagaacacaaaagcaggctagtcagctaaggtaaatttcattttcaaacgagagggaaacatgggaagtaaaagattaggatgtgaaaggttgtcctaaacagaccaaggagactgttccctaatttattctcttggctggttctctcattgaattatcagaccccaagaggagatattggaacaggctcccttcatgccaagggtctttctaagttaatactgtgagcattgagcccccattaaaactcttttttacttcagaaagaattttacaggttaaagggaaagaaatggtgggaaactctccccgtaatgcttagccaactttaaagtgtacccttcaatatccccattggcaactgcagctgagatcttagagaggaaatataaccggtgtgagatctagcaatgcattttgaatcttcactccctaccaggctcttcctatttttaatctcttcacctcagaactagacatatggagagctttaaaggcaagctggaaggcacattgtatcaattctaccttgtgctatacgtaggagagatccaaaatttggatgcttctggagactcttagacatcttttcattgttgtccatttttaaagttgatgattgctggaaacattcacacgcttaaaagcaatggtgtgagttattaatgggtaaactaagaagtgttataggcaatgacttgaaatggtttttaaattgtatggattgttaagaattgttgaaaaaaaattttttttttttggacagcttcaaggagatgttagcaatttcagatatactagccagtttaggtatgactttggaagtgcagaaacagaaggatactgttagaaaatcctaacattggtctccgtgcatgtgttcacacctggtctcactgcctttccttcccacagacctgagtgtgaaagactgagagttgaggagttactttgtggatcttgtccaaatttagtgaaatgtggaagtcaaccagaccaatgatggaattaaatgtaaattccaagagggctttcacagtccacagggttcaaatgacttgggtaacagaagttattcttagcttacctgttatgtgacagtgatttacctgtccatttccaacccaaaagcctgtcagaaagcattctttagagaaaaccactttacatttgttgttaaactcctgatcgctactcttaagaatatacatgtatgtattcataggaacattttttctcaatatttgtatgattcgcttactgttattgtgctgagtgagctcctgtgtgcttcagacaaaaataaatgagactttgtgtttacgtt

SEQ ID NO: 16159 - DNA, 378 bp, Homo sapiens
taagtatcctgagagcccagaaaaggtacactttgccttgctgtttaaaagtaatgcaatatgtgaacgcccagagaacaagcactgtggaactgctattttcctgttctacccttgatggattttcaaggtcatgctggccaattaaggcatcatcagtcctacctgagcaacaagaatctaaactttattccaagtcagaaactgtttctgcagagccactctctcccctgctccatttcgtgactttttttttttttttaacaaattgagtttagaagtgagtgtaatccagcaatacagtttactggtttagttggtgggttaattaaaaaaaatttgctcatatgaactttcattttatatgtttcttttgcc

SEQ ID NO: 16160 - DNA, 284 bp, Homo sapiens
acattcccttgatggtctcaagctatgatcagaagactttaattatatattttcatcctataagcttaaataggaaagtttcttcaacaggattacagtgtagctacctacatgctgaaaaatatagcctttaaatcatttttatattataactctgtataatagagataagtccattttttaaaaatgttttccccaaaccataaaaccctatacaagttgttctagtaacaatacatgagaaagatgtctatgtagctgaaaataaaatgacgtcacaagac

SEQ ID NO: 16161 - DNA, 1581 bp, Homo sapiens
aggggacaagagaactgtctcatagtcatggaatgcatcaccattaagacaaaagcaatgtgttcatgaagacttaagaaaaatgtcactactgcaacattaggaatgtcctgcacttaatagaattatttttcaccgctacagtttgaagaatgtaaatatgcacctgagtggggctcttttatttgtttgtttgtttttgaaatgaccataaatatacaaatataggacactgggtgttatcctttttttaattttattcgggtatgttttgggagacaactgtttatagaattttattgtagatatatacaagaaaagagcggtactttacatgattacttttcctgttgattgttcaaatataatttaagaaaattccacttaataggcttacctatttctatgtttttaggtagttgatgcatgtgtaaatttgtagctgtcttggaaagtactgtgcatgtatgtaataagtatataatatgtgagaatattatatatgactattacttatacatgcacatgcactgtggcttaaataccatacctactagcaatggaggttcagtcaggctctcttctatgatttaccttctgtgttatatgttacctttatgttagacaatcaggattttgttttcccagccagagttttcatctatagtcaatggcaggacggtaccaactcagagttaagtctacaaaggaataaacataatgtgtggcctctatatacaaactctatttctgtcaatgacatcaaagccttgtcaagatggttcatattgggaaggagacagtattttaagccattttcctgtttcaagaattaggccacagataacattgcaaggtccaagacttttttgaccaaacagtagatattttctatttttcaccagaacacataaaaacactttttttcttttggatttctggttgtgaaacaagcttgatttcagtgcttattgtgtcttcaactgaaaaatacaatctgtggattatgactaccagcaatttttttctaggaaagttaaaagaataaatcagaacccagggcaacaatgccatttcatgtaaacattttctctctcaccatgttttggcaagaaaaggtagaaagagaagacccagagtgaagaagtaattctttatattcctttctttaatgtatttgttaggaaaagtggcaataaagggggaggcatattataaaatgctataatataaaaatgtagcaaaaacttgacagactagaaaaaaaaagatctgtgttattctagggaactaatgtaccccaaagccaaaactaattcctgtgaagtttacagttacatcatccatttaccctagaattatttttttagcaacttttagaaataaagaatacaactgtgacattaggatcagagattttagacttccttgtacaaattctcacttctccacctgctcaccaatgaaattaatcataagaaaagcatatattccaagaaatttgttctgcctgtgtcctggaggcctatacctctgttattttctgatacaaaataaaacttaaaaaaaagaaaacaagct

SEQ ID NO: 16162 - DNA, 101 bp, Homo sapiens
ttcctttctggagctttgagatctaaaacttctgttgcttttgccattccaaaactttgtctttgccagaaaagtgttggtaactataaagaaaattatat

SEQ ID NO: 16163 - DNA, 67 bp, Homo sapiens
gcagccatcttagatttctttgttcctgtagacttatagattattccatattattaaaaagaaaaaa

SEQ ID NO: 16164 - DNA, 3748 bp, Homo sapiens
ccattacgggcaattttatgaacaagaagaaggatacacaaaacgtacccttatctgtttccccttccttgtcagcatcgggaagatggtatgaagtcctctttggggcagggactctagtagatcttcttgtcagagaagctgcatggtttctgcagagcacagttagctagaaaggtgatagcattaaatgttcatctagagttaatagtgggaggagtaaaggtagccttgaggccagagcaggtagcaaggcattgtggaaagaggggaccagggtggctggggaagaggccgatgcataaagtcagcctgttcaaagtgctcagggacttagcaaaatgagaagatgtgacctgtgccaaaactattttgagaattttaaatgtgaccatttttctggtatgaataaacttacagcaacaaataatcaaagatacaattaatctgatattatatttgttgaaatagaaatttgattgtactataaatgatttttgtaaataatttatattctgctctaatactgtactgtgtagtgtgtctccgtatgtcatctcagggagcttaaaatgggcttgatttaacattgtttttgtgttatttttgcttgaaacaacgcacacattttcaacaaccaaaaaatgacaatttctagtttagttaatttctacaaatcatcttatgttattagcaaggttaagacatcttttttaaaaaaattatagcttctaccaagagaaacactcaatttttctagagatttgcctctatcttcctttcctcagtcttcccagactgctatcaagctgtgtaaaaatttactttcactggaccctaaattattgtctctgctatctgactgccagtaattagtgcagaaaactaagacaggatgatacaggtttgaggggctggggagtgggaggggggagaaaaggaatgtatttaaacaatttccgatgcccatgatgagtttaaaaaccagcattgacaccatccccaaaattaaggctgtcgcttattgaatccacttgtgtccaacctcccaggattgttttatcctaatgtcacctgtatattcatttgaaaggacttggccctgttcttgggtcttcccgttacctgccccctgggtggtaagtttcctcctttctcaaccttccacgaggaggaaagaagtgtgcagtcattccacatggcctgttggaaggcctggggagggaactttgggtttgggacagatttttttttttgtttttggtatcattcacagcatacgatttttactctctccatcttcaccataagacagataatttggggttgctataatgctgtcacacatctcaaagtacattcaaatcttaaaaagaaattctcgtacttttgccatgttgatactgttcagcaaacaagctaccaggaactgtgaggctttgtcatttagcattagactttaaacaagaattaaaatcatgtgctgtatttttaaaatctagccaaattaaatagtacatgagaaattcagagtattagacagttttaaggcattcaactgagaaaactttatttgtcaaagtcagaaaacattttcatcttattgagagatatgtttttaaacttttatcatcatttgtaaatgtggaagttggtggattgctgtgtttttgcatgattagcatgggagtctgttggagcaagaggaacatgcttgttttgaaaactcgagatgatgagggtggtacatgcagtgtgttctctctttattggcttctaaaccagttttgtcctttaatgcatgtcaaatatttctcccatgcttctcttagcagaaaagtttttacctataagacagggcaccttttaactctaaaactagtgatactcagtgacatagactttgtcttataaacattttttcattttttattttgaaaaattgcaaatctacagcaaaagtaaaacagtagagtgaacaccatgtaaccctcacctggtgttaacattgtaccctatttgctttaagttgtatgtatttctgaacttggcaaaattggaaattaaaatttttaaaaattacaaatatacaaagttatttatcttagcacatttattatgtgtgactgcatctgatttatatttaaattggcaggttttgagggatttttttcttcatcataaatgtaaacataggattttagagtctatttccccaagcgccacattataactgtaaacttaccatcttctatgtagctgtgatatctcatctttctaaaatggaacttgttaaaaagtgttcaaacactatccctaatgcctgcggcagaatttatatacgatccattcattggggctcaaagtatcttttagacttttaaggacaatttacagcaaatgaaatttatgatgctgtgacaagaaatttaaagaatcaaaacgatggtttgaaaaggaaacctatgatacatgcaggagaagcaaaacccaagtgattggtgagaaatatagaaattatttaaattactttatagtaattattaaacactaatttttgtactgtcattgaaggtgttttatagagaaatctgagaaatcacattcacaaattagaagtcaaacatggccaggcacagtggctcacacctgtaatcttcaggatttcaagaccagcctagccaacatgacgaaaccccatctctactgaaaatagaaaaaaaaaattagccaggcttgcacctgtaatcccagttacctgggaggctgaggcaggagaatctcttgagcccaggaggcggaggttgcagtgagctgagatgccaccaccacaccagcctgggtgacagagtgaaactcgtatctccaaacaaacaaacaaaaagtccttaaacatatgtgaacaaaaattttgtgatggaaggattctagttaatgagtattgcatcaagatttacatctttcttactaaggaaaagagttaataaaaattgttctttattttacaggcagttactgaggctcttcccagatctcagtaaacagccactcagccttgaaaatggagtgttgttgtttctaaacatatatttatgtcatttattaagtacagttcacttaaataacataagtagattttctcttgtagtgatttgggtaggaagaggccatgtttcagttcgttttctctgtagggtcgattgaattggaccttttcagttgttcagaaaaataaaaataatttctcatattaaatacagacgctcctcaacttatgatgtgggtaggtcccagtaaacccattataatttgaaaatatcacattgaaaatgcatttaatatctcttacctgaaatcataacttagccaagcctaccttaaatgttctcagaacatttagcctgcagttgggcaaaaccatttaacacaaagcctattttataatgaagtgttgaatagctcatgttatttactgaatactgttgtgaaagtgaaaaacaatgattgtatgggtactcaaagtataatttctactgaatgcatatcacttgtgcactgttgtaaagctgaaaaaccgttaagcctctacgatttttaagtaagttggggaccatcagtttaaaataaatgcaatactatttcatgataaacatggtcactgtaagttttactcttttgaatgagggtgcgacagaatgcagttagaatcagttcatatcaccattaaaatcatccattcagaaaccaa

SEQ ID NO: 16165 - DNA, 1475 bp, Homo sapiens
cagagaacactgcctgaagacacacagcaataagtgattacagctcctagactaccttccaaaacctgtttgggaagcatattacagaaatgatttcaagtaccctgtattctggatgctaaaaaacaaaaacaaacaaaaaaacaaaaacaaaaaaacaaaaccagaatcaggtaaaacagctatgtgattaaaatattttaattcttcagcaattacccggttttctaaattgaatcatgcatctatttataattctaattattttgtaaaagaagacaaaattatgaatcttaagtatttgctccatctttttctctgtaatggtggagaggctgcccataattcatctccacatggagccaagtttaatgtttctagttcacattttgtacttctgtcatgcttatttcaaactccctgagtgatgggtaagaaatcaaacattgcctcagtggtatcaagagaactttggtggtggtttcttcagaatcatgaagttcttttgccagataaatattttgatattattttcctttttaatataaaggataggtttgaattgtacttaaaatgcatagcattattaaaaacaatcttttaaaatataatttataacatagattgaagcctccccttaagaaaccttaaagaaataagtatcctactcaaaaaaggaagtctgtttcagaactttagggcctttgaaatatttcctcaagcctatttcatgagatctacttggtttacccaagtcatgtttttaatagactgctaatatcaaaggagaatttttaaagccttaacaatgcctactttccattcactgttaacatggaataaacacaattcccaacatcttagatagtgtattatgcttccaacagacagtccctctcatataaagtttatgtaccctaaaatctaacccaataacctgtcccgttgccaatagattgagaatttctggtttgcttactctacagttattcaaatgagagtcacgcttttaaatttacagctcatcacagaaatcatcagctatacattagtaaaaataaggacatgaggttttctttcttggtttttgtccaagatctttgcaccttaatattaatggactgtttcaggtaaaagagaatgaatgtatgattgtgaactgtgaagagaatgatgcaggatcctatttagttactgaataatacagagtattcaatgcatgttgtatgtgccaccaagttactattaactgtttttggaattgaagactctgtatagtcaatagttgtgaaattcttctcaggctccttaaaccctcgctttgttgtaaaagctaaaataaacagcatgctatattgtaattgtatttcttgctgaccaaatctactaaatgctattgatttctctctgattactaaaacacattgtttattctcagtagtttcccccaaaatgcttttttctttgctgaactt

SEQ ID NO: 16166 - DNA, 665 bp, Homo sapiens
aaagttaatgcatgactttgcaagtgaaagccaacagtagattttagtcttaaaatttacaaactacgtacagctgtttcagtattttgaatacaaagaaaaccttttgtattggtaacttttaataggaattttaatgaatctggtttttttatagggtgttcttagttctgcactggatttgctagatttgttggaagcctttgtaccttatgtatcctcgtcattggtggtacttacttaaccaattaaaccatttctgttgtggggttattaaaccactggtagcttttataccagatatataatccttatatccaattacacatgaagaaggaaaagcaaaactcaggaacactgctattgtgaattactcttggattcttgtgctttgcctttgaaaatgcttaaatggccatgaccctcttcctgctttattctagtgtagtctttataaaacttgtgggatttgataagcagttcacatgcaaaccagtatcttttaataatacaaagtagcatctggaacaatagacagtttgaagttagaatctgcttagacaactttcttacttggtaaattcgactttttaaaacctggattatgctgtaggtaactagtaatcatatataggctataccagtgtcatgttgtttctgtggtt

SEQ ID NO: 16167 - DNA, 504 bp, Homo sapiens
aattcatatgttctttattttacttggaatgtttcattaacatgttttgtatgacttataccataatgcccatatgtccatttatagggaggtaaaacacattttcttttaaaatgttttcctacacattttcataaagcaaaataattgtattatttaagcacagaaaaaaatgtatcttacatccaaagtagggagggcatccaacatattatagatttgcttttatatattttatagctttgtattgcatagtttgtctttaagagttcaagttagacttaaatataattttgatgttcactggttttattttaaattgccttcttatttgttagcaaaatgcctttttttaatggtctctgtaaattttctgggctttaatgtaatgccactgtgtaaaaaaaaaggaagaaaatagtaatagccatttaatgttttatatttatcattttaaagatatttttgtcaaatttcttttaataataataaacatatgtaatc

SEQ ID NO: 16168 - DNA, 1005 bp, Homo sapiens
acacatcctaaccaggatatactctgttcttgaacaacatacaaagtttaaagtaacttggggatggctacaaaaagttaacacagtatttttctcaaatgaacatgtttattgcagattcttcttttttgaaagaacaacagcaaaacatccacaactctgtaaagctggtgggacctaatgtcaccttaattctgacttgaactggaagcattttaagaaatcttgttgcttttctaacaaattcccgcgtattttgcctttgctgctactttttctagttagatttcaaacttgcctgtggacttaataatgcaagttgcgattaattatttctggagtcatgggaacacacagcacagagggtaggggggccctctaggtgctgaatctacacatctgtggggtctcctgggttcagcggctgttgattcaaggtcaacattgaccattggaggagtggtttaagagtgccaggcgaagggcaaactgtagatcgatctttatgctgttattacaggagaagtgacatactttatatatgtttatattagcaaggtctgtttttaataccatatactttatatttctatacatttatatttctaataatacagttatcactgatatatgtagacacttttagaatttattaaatccttgaccttgtgcattatagcattccattagcaagagttgtaccccctccccagtcttcgccttcctctttttaagctgttttatgaaaaagacctagaagttcttgattcatttttaccattctttccataggtagaagagaaagttgattggttggttgtttttcaattatgccattaaactaaacatttctgttaaattaccctatcctttgttctctactgttttctttgtaatgtatgactacgagagtgatactttgctgaaaagtctttcccctattgtttatctattgtcagtattttatgttgaatatgtaaagaacattaaagtcctaaaacatct

SEQ ID NO: 16169 - DNA, 1597 bp, Homo sapiens
agacaaatcttcatgcagactggacttctcctcctggtagcactttgctctgtcatcctttttgttcacccccatccccgcatctaaaaccaaggatttcagatactcattgcagttgtggagtttaatcccctttcttaacctcacttcccacttgctattgaattgtgaatagtcattaaaaacctgtgataccaaatcttcagctgtctacttggaagaacatggaataagcatacttaacagtgaaaagaatctttaattatgtattatatctgtaatatatttattttgtttaaagaaggctttctaacaatgactgactaaataaagctgtctgctcctgcattgataatgaaggtgcgttgtatttgatacccctccccccctttttttggcaaaggaggggaaaggaaggtttaaaataattgatttaaaatgtcactaagtgtagactgatgactgtatagagatgtgaaatgtataattacacatggaagcaatatgttgctgtgttgttattaggttttttttgtttttgttttctacatcttttaaagacttttggaaatttggctgaacaattagaacacaacaggccaactcatactcatttggatctatttagacaacgttaaccaatatatctatagctttagattatattcgataaaagtaattggactttttttctttttttgactcgttgacaagtgtctttgtaatatgtttttagttccctttttttgttgtattataggcagatgaacaaattaaatttggcctcaaagagagaacttactcccttctggatatttttgccacatttctttgcaaaaggagatatatatatctttagtcagttttgttgttatgagaaattatgggttattttgtggcatgctctttgggagctgcacagttatggggaggactcccactgctgtgcaagttaagtcttttacaaaacaaggacagcagaggagggtttgcagagacctccctctgaaaaacacaaagaatggactctctcctgggatgaggacttgctttctttacctccggttctttccatgtcttagttggatgtccctgaaatggacacaggctgtgccattgtgccagaaacattgtgttatcttttatgttgttgttgttgctgttaaactataatatgtgacttctttttttattattttttgtttgaatgctttaaaaatcttttaagtctgtggatctgctgatgtacagtgcctttgctgctatggatcaaaatcaaaagaaccgtgtagatatactttattgtataagtagaaaattacttaatttcatactagaaatggatggatgctgcaagttgaaatggactgtccattgacgttcctaatgtggtagcagaaaaaaaaaaatggtgtcttaagtgcttagtgtttgatgtcattaacagtttcgtaaaactctacagtgtagaaagattttgatactaaactgtgcgttgtacatagttctaatgcattgtattgaccaccagtacttctataatggtagattgtttgtgaattcagacttttaagcattaaacataaataacttctag

SEQ ID NO: 16170 - DNA, 50 bp, Homo sapiens
ttcactccttgttgagaatcttgattctccccaataaatgttccaataag

SEQ ID NO: 16171 - DNA, 343 bp, Homo sapiens
caatgattttgtatcagtggtccaaacagaactaagcataaatcattgtgccatcccaaacctcgttccagccgccttgcccatactagattctaaatgtttctaaaggcaaaccccaatgtgtcaagacagacttgtttaggtgtaattttaggaattatgctggttcatcaggaagcagagggggagttttaaaagtcaagcttaaattgaagtttaaattcatctataaccaaatcaaatgatcagaggaaattctgtaatcaatgctggaaatcgttacattgtttagaacattcttgctcatgcctgtatttgcacaaataaatgaaacttcgctgtc

SEQ ID NO: 16172 - DNA, 1208 bp, Homo sapiens
ttaaactaaaatagtattaggaacaattaaaaacaacaaggaaatatttagaatttgttcacaattttacttatgatactttgtgtaaaaaggaaaaatgaaatttcatagcttatttcagtttaattttaaagtgtttaatcatgtttgttatatgtggagcttttgaaaataagttaatctttttttttttttttttaatgtcagggtattgctctgttgcccaggctagagtgcagtggcatgatcataggttattgcatcaacctcttgagctcaagcgatcctcctgccttagcctcttgagttgctgggactataggcatgtaccaccatgcccagctaatttataattactattattgttttgtagggacagagttttgctatgttgcccagattggtctcaaactcctggcctctcactcctgccgtcatggcctccaaagtttactttttttaaaagtaactgttagatggaggaatatggtgacccactattgttgagaaatttgttttccacttgtcacgtcacataagatgattgctaaaatattgtactggtgttcggtggtgagtcatatttttgaaagttaataattataaataggtaatttccttctaatatgttggtactgtctatggccataccaccctgaacatgcctgagcttgtcataatatgttgagtacccaaaagatttgtttatattgttaatcttagggaaaaaaaattaaaatccagtagatcagaacatcaggctttcagatacaaattgatttactggtttttattttgctgattataatatttggtatatttaaggtaatctagttaactagatgctatttcatagattatattgaatgatttaaaactttattttcaaggatagtttattttaaatggcatattgaaaacatcattattaagatccagtaggtaggacatttattggattaaaatgaagcatttatctatgtctttaggtgtcattgttccctttctgaattagctgtacatataagccttcctttggttttaagtactgatttttttttaaaaaaaagagggactgtttaccattcttccactgtgctgttataaagttgtatttgaaaggtaatgttgtttttattaatcttttgtcttaaaataatttaaagtgctttgaattttaaaacattaaacaaatccttaaataacaa

SEQ ID NO: 16173 - DNA, 6080 bp, Homo sapiens
taataatttggtatttggaggctcctgtgtcactgcaggaactaaaggaggctaaatccatgcctgatggaggagaagagttctatggttatctgcaaattctggccagacaacatcttgacgtcactccttagcttccataacctagccaagcaagaagttgcctttccaagacaaagcagtgtgctctaatgactaacccctcaaagtactatgccactttaactatagacccatctcctcgatcaatcaggatggcaagatggagctgaggagctcagcaacatcaagtctggagttggtctttaactcaactagctcgtttagacgtgtctgaacaccacatcacctgacagcacggggtggtttcccagtaaaatttacaaactcagctcaagggcagctgtgttgctttcctttccttgactgctgagaaactttttgacagggaacaatggaaacacaccttctgagctgaaacaaacaaacagaaacaaaacatactaaccagcaaaatccccaaatcatcaatcttgggttctcttgaagggcaggagtgtgttttatcttctcccgtcggagcaaacactatagatgtcctccctaaaattctgtcttccctagagcagccttgtaaattagctagggtcctagggttgaggcctaaatcaacttaaaattgtctctaaatatgtacctggatgtgtttgtacttgcagagcatgccctcttcatgtgcctagggctagtaactccctgtggcagaggcatgtaaagtattctgactttttttttttcaacttaattccatttccaatgaaatggatttttaaaaattttctccagagtgtgccatacttctccagctattatagttaatgtgtgtgtatccttgtgtatatgtgtgtttgtgtgtgcatatgtgttttcctagtggttacatgcttactaggcaattatgtaaataagcacagattcataggccagctaggcctgaggaaagaagacattataaagggagggagtattttaacattagctaaagctatcacacaaggcacccattctgctcccctcaacagccacagcccacttcgtccttgtcttaccaataaggggaaaggctggaggtgatatttttcacagaaccgcagaggttttgaacatatttgcaacattactttgagtacacatgagcaaaaattctgaattacatccaggaccccagaagctcattagatcaaagagtgcggggcccctcagagttaccagagattatctgcagacttcagtgcaatcgaatgaccatggtccattttgatggtcagaggtaggactgaaaaacgggtagaaacaattgctttagcgcttccttctgtactttgcctattaatgttttgtctttcaaaaatatattttctcctaattgtttaattggccaaataatggctgctttgggagttgtttgtatgccttggaaggccatggcctgcactttaaaaataagctaagtccattctgcccagcacgagcattaggacagagaatgcacttattttaggatccttaaaaattgcttcttttatggcacactgggttgacgactcatctcgtgggagccttcatggcacattgctgctgttctgcaggtcccaatacaattccttccccctctcagtgccacggcccccccattgctagctacaacaatttgatatcatattcccttttcaactccaaaggagatgataagaagctatcaaataatgctttaaaaaagcaacttgagtttcttaaaagaaaggaaatgaatacatgctgcataattacatttaaaatgtaagccatgttattataagccgcactgagatgaagatttgttagcaaaccagtttcaagcacactcacagtgaagtaaaatcatgtttttagcatctgaccattgggtaatattattctttgttatcaaaagagaaatatcacccaagtatagtatacttagacctcctagaggaaacactccagtcctaagcttggtgtctgaaaagaaaaacaaaaataaagattatggatttaggtcagggagacagagtgatattctgaagactgtgtttactccctcatcatcggccaaccaagatggagttctgcatcctgcacatatcagacatttcagtccaatttcaccaaagcatcagtgatgttctagaagcatcccagcagatggaggatcctaatgtatttgttctgggtatttcccaaggcccagcctgactggagtgtgtgtaccaacaggatgaatccaatcaagctacgcccccattttggtttcggattggccactcttgcatgtgctagtagattgtggaccaggaccagctgagcaaacacagttgcagagtagcctcctatgttgctaagaagctcctgctacccaggtgctttgaacaattgagtgctccctctggttaagtagagatggcaccaccggagtttttcttggatgtgaggctcaatcctttacggcagctattataacaaagtgaaggttttctccctgggaaatgcagcttttctctgtctttactaattctgccagcctgtgagagtaaccaccgtagctgggcttcttctcagattaattgtcatgccaggtctccttcctggggagctgtgatgctgctctgaggttgattgctgaggttgtagtgggtttttgtttgtttttgtttagtttttcttgattgttcttctttctcttgaatggcaagagaagaaacactttctctaacccacggccaggaaggaaatggggagagagctacttcttagttcaacctggttgccacataaaggaatctctctccttggactcagcccctaactggaagcaagagccactgccctctgagactgagagagcagcccgaggaggagatgaatccattctgccctttgtttgggtttgcttcctgtcagtgagagaatgctgaggcagttcctgttatgtgaaactttcatttttaaaaccaggacagtcctaaacagactggaatgagttggtcaatcccagttggtataggcccaatgatttttgctagtaagataggattgtcttcctcacccaaaatgccttcaagtgccctaaaatgggtattttaaaataagaataaataatgtagatttagtagaaaacctggaaaacataagaaacaaagatgaaacgaaaagtcccatgtaattccaccagttagagttaaccactgatatcgtttggatatatggctttctagtcttgtggatatccttttaatctcttgtaatataaagtctgaccatatgtgtccttgcatttgtttgtactggactctgttaatatttctatagtaatggctcactttggggagattgtgctgcacagtgtgtaggaagcacattgggtgtattattcccagttttgtattttgtatttccttggagatgtgcaggggttaagagcgggggtctggccatagctggccacgtcagactctcatatggtaagtatcacagagcacatgaggcctgtgttatgcgctggaaagactcaggaaatgagaggctctcttgttctgacaaggcaggctgagagctctcatttagggtcatcactccagataactccaaatgcagtttattgctcaactgaagcagatgatcactttttgcctccaagttcttcaccctagctagctcctttcaaagagccgagtatgctggatcttaaagggccaaactagttacatctcatacatttcctgatgtttagggatgccttcacttccatcaaggataccttggctgtgcaaggacctctgatagctggagtctccttttggtcactcccagctttgcttaaacttgatggagtttgctgtccagtgatccccggatctttcatcatgaaagccttccttcctctcctgatgtctcaggcctctagacctagactggggttctggcaaggaggcctctatcaatagtatgacatccaataatatgttagtgttgatattttgcacagtaatattaagtttaagagattataaaaatgagttcaaatgaataagttcctgtgatgtaagagattagatatgtgtgatttcagaaccaaaggcaggggggaatcccagaaagaaaacaataatataatcctagtttctatatattatttttattcattactgtatatgggtagagatcaatattctttcttatgctgttactattaattaacacattttttaaccatgccattgaacttttgggtgcattaaagtggaacccaagctcctcattagataataatggcatttggactgagtgccatattcctaaatttccaataaagtggttgatatagagaggacaggataaagccctatagtgtgcagttatatcaaaacagctagtctccactttagggaatgcctttactagagattacatgaaatgtctgcttataaaataagcagagatggcaccactaagcagccacctgaattgttttcctacaggaatgattacttttcagatccatttatgttttcatgctcaatacttactccccttccctgcaacacccaaagagtttacttttgcaagtcatttggtcttcagtctactactgaggaatagagaggcactaactgctttacccaggatcagaactcatgttcttaccttctattaatagagtacttgagccagatggactaactggtctcacattttctctatcttggttttacttccataaacatcaatatctttacccacatgatttttccatcctcccatttttttccatatgtattagggttcaggaactatgatgctaatgatcacatttcttcctagttcctaatttcattagtgccatttcctgatatctacagaaacaattatcaatacatgtagctgcttgagccttatttagaaggctagcctttcttttccaagtgctgtcagaatgtatacatttagtctgtctttttcccttttaggagtctttgttctgggttgatggcaaaattcctctttttacatgtgagatttttgatttcactgaattctacctagatttttatggacattggattttaaagaggaaaacactcattttcttagtaagatattggtgatacatagctatgccattgatttccatactcctgagctttggggagggagacagtggccaagtagcaggcagaataagatcatcactcatgtcctgaatcaatcacactttccttctcggattgtgtatatgctctgccacttcctacatattacatcctgagtttttaagtaaagtggatcttagccagatttgagtctaatggctgattcatcggcatagttcttggcgttaacatctcagtgtcctctttagttctctttgaggattcatgtcattgagggcctttgtgcctccacttgtctcagtatgaggaagaactttggtgtgagggcggagctatgtgaagggttgctgggttgggggattagttcatatggtccccatgccatctatttacttttggagagaggggactttgagtgggtgggtatggatagatgttcctcaaggaaaccctgctggctaatgggcactacatctgtgtattactgtgattctctctgtaagctccccatgtggccaaggacccccctcctaccagggcacttcctgccacctcattgcactggtctcaaccattcagcctgctgctgctgcaccatgttgggctgcggtaggatagggaaggggttctgttgattgctaaatgttgcctaactttatttccctctcccacatttcatgcaagggagcggacctaacacatgacttgcattctcttcctatgttcagaaactccagggcttgcccacgtgtatgtatgagtgaccaatggagcttggaattctttatctatatgatctgtccgaaaatgagatcttttgtactggaatttgtgatgtagttgatcattcagagccaaacgcatataccaataaagacaagactgtcatat

SEQ ID NO: 16174 - DNA, 5127 bp, Homo sapiens
ctgaaataaaggaaaagacagagaaaggggctgtggtgcttgttggttgatgctgccatgtaagctggactcctgggactgctgttggcttatcccgggaagtgctgcttatctggggttttctggtagatgtgggcggtgtttggaggctgtactatatgaagcctgcatatactgtgagctgtgattggggaacaccaatgcagaggtaactctcaggcagctaagcagcacctcaagaaaacatgttaaattaatgcttctcttcttacagtagttcaaatacaaaactgaaatgaaatcccattggattgtacttctcttctgaaaagtgtgctttttgaccctactggacatttattgacttaattgcttctgtttattaaaattgacctgcaaagttaaaaaaaaattaaagttgagaacaggtataagtgcacactgaatagtctaatctacatgtaacacatattttagtgtgattttctatactctaatcagcactgaattcagagggtttgactttttcatctataacacagtgactaaaagagttaagggtatatataccatcactttgggacttggtagtattattaaaaggttatttccttcactgtcaataaaagtccaaatgtttagcttaggtctgagagtcaaacaatgttaaggattgtcttaaagttccttagccagcaaaacaaaacaaaacaaaacaaacaaatgaaaaacgtttaaaaagaagaagaagaaaaaaaacaagaacaagcagcaacagctgttttgttggggctatagatttaagttaggcatagtcaatttcagaataactaagagtggaatatatgcatatggtgaaattataaccttgcccttttttatttgccctctgcgatccacctgctttttagaagtctgccgagtgagaaggccacagtatctcatgctgtttgcattacagaactgcagcttttctactctgaaaaggcctgggagcagaatggctggcctgctgtgagcaggagaggagattctaagaaggatagtcccccctacaacatactgtcatactgctgggttttcatgggtaggaaagcttgtcctgaccccagcagcaaagaggtggcaggtcgctaatgaatatatgctttataatgtccttcttcattgctgagagggcagccttagagctgtggatttctgcatcccccctgagtctgacccatggacacctgtttcattcactttagcatcacagtgacctttgtatgctctgttcagtctgtgtcaggcagtatgcttgtcctgaagagaggtttggctatccccaccccaccccaccccaccctgttccttttttatcaggaggacttcagagccaggcctgcagcattttgtttgaaaacacaatcagctctgacagttagacatgcacacagacgccatagctggattggaaacattgatgttttaaaaatttattttttttggaaatagttgcacaaatgctgcaatttagctttaaggttctatagatttttaactagtccaacacagtcagaaacattgttttgaatcctctgtaaaccaaggcattaatcttaataaaccaggatccatttaggtaccacttgatataaaaaggatatccataatgaatattttatactgcatcctttacattagccactaaatacgttattgcttgatgaagacctttcacagaatcctatggattgcagcatttcacttggctacttcatacccatgccttaaagaggggcagtttctcaaaagcagaaacatgccgccagttctcaagttttcctcctaactccatttgaatgtaagggcagctggcccccaatgtggggaggtccgaacattttctgaattcccattttcttgttcgcggctaaatgacagtttctgtcattacttagattccgatctttcccaaaggtgttgatttacaaagaggccagctaatagcagaaatcatgaccctgaaagagagatgaaattcaagctgtgagccaggcaggagctcagtatggcaaaggttcttgagaatcagccatttggtacaaaaaagatttttaaagcttttatgttataccatggagccatagaaaggctatggattgtttaagaactattttaaagtgttccagacccaaaaaggaaaaataaaaaaaaaggaatatttgtacccaacagctagaaggattgcaaggtagatttttgttttaaaatggagagaagtggacagataaggccatttaatatatcaaagatcagttgacatctcctagggaatgatgaaaacagcaggctattagaaaattatttcatatagttctcgtgttcttttcttttttttaatccctgaagggatgatcagtaacatagcttctcttttctgtactctagaccaccccttttcatcattttgctttttatgtctcccataagaaatgtgctttttagagcttcctaatgcatgtgttgcattattgcagcattagaaaaggagaggtagcatttttgctgaaatcgggcctgtcactctccaataaaggttctggcacttcaatgccaggcaggtctcctaaatgaacagaatgatctgtgtgagccgatgcctgcccttccagaggggccactgtccccagccgcagccaactgtgtcccacaggaatgggagcctaggtttccaaatcttgtgattctttaggagaaacatgaaacctggatttcgtgtgaaatgtcccgattgttaaaaagttggctcaattatttttaaaacattttgtaagccaacaaaagtctgtgggctgccagtttattacttttgtcttaaaacatgatcattgttctctcacggtatccttctgtcttcccgttgcaaattcacttttctttcttcctgacattgccattgagggctttgttaccacaagctaagaaactgagtttaacagcccagttatctgcaacatgtcaattacctttgctcctctcctgtgattcccaccatgctgtgaccctcagctgtctccctttgctgggaattctgcaccaatgtctcccctcaacccattccctggttggtcctactcccgtgtggccagagacatcctagcaaatccttcctcctattatatctgacactaatttcttttcaacagcgctcatgtctcttggcccagtcaggtgctgccaggtttagataggaaagtacatgtcccattttcatgggtgcccttaatgtggtccacgtcctatatcttattatatttactcatggctcaatgggggcctccagagaccctctcaggctgctgagctagactaaggaatgcatccaccgtcatcacatgagacactgactctgtgacgacaaaagtacaaacagtctgaggctaagaaaggttcatctcacaacaggaaaaacaaatctcaacacacattagagataattgattcaggggttttctctcccagtctcccagcagggactgatttcatttctgacccactaggttttctttccagaaataggtagcaaggacaagaactaaacaatcccagccccacccagcaacacagaacacaggagtttgcttttggcttctcactctccaagtaaccctgaattaggcccagaatggctgaggcttggagcatctcctcagacagagcagaggcgacacctcttcaggggtgtgtggagtaaatagctcgaagagctgaagacagaaaaccagtttcacgccaggtgcgagagagagcataatggagggaagcccgctttctctctcctcttcttttctctttatttctttagagcacttgacttttttttctctctctctctagtattctaaactgaccccatgaccaactgagaatttatttttgtttcattggttgtttcacagaattagaacacacacgactttttattcctccattgcaaaatggaatcaagatactacacaagacctgtgctttcttcctttgcatgatttacacctccgcctgttttggtgctagctgtctagaacttctctcttggtttgaatctgattccttcacactacactagaagtttatttcatcttgttttgtctagactccagatacagagggacagctggactgaggacaagcaattccatctagcatagggtctctcagggttggtgcatccagccacatgggcagggccagtcacatctagtctatgtccccagagcccttggagttgcgcagcttagctgacttgactccaaggaaattagtacagaagtaaccactctattaagtgtgttctgctatgttcacatgcctgtagtacctgcaaaccatgccaggttcatctaaagacataggggaagattaaggactcttttggacagaccatgaattgaatttgctgccaggtgctgccagactgaatttggctgacagaactcccagcccaggaaagttccatgacaatgactgtcgcagaaggaaatttcccactaaagtcagtccattttcaagttttggtcttcagagacaaaagaacgtcccagccacctgattttgatggtgaggtaactctaagttgaattcaggctagtgttgcagtatagctttggcatgttcatgagtgagcacccagaatgtgttgaaccaacccccacccctaactactgactatgactgcagtgggtttttatggggaaaaaaagtgtgaaaagcaaaaagaaaggaacagagattttttatcacctttattgtaagacagtccatttatgaattgagtataaacacatacaaagtaacaagagattcctaagaaacgcaaatccttgagtttcacgcacttcatgttcaaccatttgctgtaatccagaggcagcctgtgaatcattctcatgccctgttttttttttttttttcctataatgttctgggtttaaaagccatcttttccacattttctgtaaataatggataatcattttaaaaatttttatttttagtgctgttttaacaatgtagatagatcataaatgtacttgctgaattcaatcatttttaacaagccaataaagtttgataattcatctc

SEQ ID NO: 16175 - DNA, 2153 bp, Homo sapiens
ggcccttttccccagaccgatccttcccaacgtactcctcagacgggctgagaggatgaacatcttttaactgccgctggaggccaccaagctgctctccttcactctgacagtattaacatcaaagactccgagaagctctcgagggaagcagtgtgtacttcttcatccatagacacagtattgacttctttttggcattatctctttctctctttccatctcccttggttgttcctttttctttttttaaattttctttttcttttttttttcgtcttccctgcttcacgattcttaccctttcttttgaatcaatctggcttctgcattactattaactctgcatagacaaaggccttaacaaacgtaatttgttatatcagcagacactccagtttgcccaccacaactaacaatgccttgttgtattcctgcctttgatgtggatgaaaaaaagggaaaacaaatatttcacttaaactttgtcacttctgctgtacagatatcgagagtttctatggattcacttctatttatttattattattactgttcttattgtttttggatggcttaagcctgtgtataaaaaagaaaacttgtgttcaatctgtgaagcctttatctatgggagattaaaaccagagagaaagaagatttattatgaaccgcaatatgggaggaacaaagacaaccactgggatcagctggtgtcagtccctacttaggaaatactcagcaactgttagctgggaagaatgtattcggcaccttcccctgaggacctttctgaggagtaaaaagactactggcctctgtgccatggatgattcttttcccatcaccagaaatgatagcgtgcagtagagagcaaagatggcttccgtgagacacaagatggcgcatagtgtgctcggacacagttttgtcttcgtaggttgtgatgatagcactggtttgtttctcaagcgctatccacagaacctttgtcaacttcagttgaaaagaggtggattcatgtccagagctcatttcggggtcaggtgggaaagccaagaacttggaaaagataagacaagctataaattcggaggcaagtttcttttacaatgaacttttcagatctcacttccctccgacccctaacttccatgcccacccgtccttttaactgtgcaagcaaaattgtgcatggtcttcgtcgattaataccttgtgtgcagacactactgctccagacgtcgtttccctgataggtagagcagatccataaaaaggtatgacttatacaattaggggaagctaatggagtttattagctgagtatcaatgtctctgcgttgtacggtggtgatgggttttaatgaatatggaccctgaagcctggaaatcctcatccacgtcgaacccacaggactgtgggaagggcagaatcaatccctaagggaaaggaaacctcaccctgagggcatcacatgcactcatgttcagtgtacacaggtcaagtcccttgctctgggctctagttgggagagtggtttcattccaagtgtactccattgtcagtatgctgtttttgtttccttcactccattcaaaaagtcaaaatacaaaatttggcacagcatgccaacgggaggctgtgcccagaccaagcactggaagtgtgcttctaggcatagtcattggttttgcaaaaagagggctcaaatttaaatagaaatttacagctatttgaatggtcagatataccaagaaagaaaaatatttctgttcctcaagaaaacttgctaccctctgtgaggggaattttgctaaacttgacatctttataacatgagccagattgaaagggagtgattttcattcatcttaggtcatgttatttcatatttgtttctgaaggtgcgatagctctgttttaggttttgcttgcgcctgttaattactggaacaccttatttttcattaaaggctttgaaagccaattctcaaaaattcaaaagtgcaaattaacagaacaaaaggaaatccagtagcaactgcagtcaagcgagggagttgacaagataaaccttacgtccattcaagttatatgctggcctatgagagatgagagttgggtcgtttgttctctttgttgatgattt

SEQ ID NO: 16176 - DNA, 342 bp, Homo sapiens
gagagactggggaggtggccataaaggggcagagtcttctttcagacccaactcttagagggcacatcaccaggctccacatcacgggaagtgagatggatttcttgggtaacaactcattataaggaatacttttagtttgacagccttatatgacatgaatgaaaactgctgttttaaagtggtttattatgttccatggaagaaactggtcttattgaatgcattgatgaacgttatatggttttattacagatttaatcacaaatcattttttatgaatgattgagtgaaaatagtgtttataaaggttaataaatttcttgacaaaaaaaaaatgca

SEQ ID NO: 16177 - DNA, 2956 bp, Homo sapiens
atctctttggtaaatcccctgcctaaatcccctgccatggaatagctgcctaaacttgggcaaataacttgacatttctcagtttccacattccaaaaatggatttttatgagaattaaatgttatgatgcattccagctacctgtcctagaacctggcataagagctcagtacatgctggggagggttatcatcatcgtcatcatcatcttattaacattcatgttgaagggatgatgggctgctgagaagttcatgaagaaggtgaaaaactattacagaggtgggaggaaaaagagaggactatcacagaagcagaagagctgagagtattgagaaagggtgacgggttagggggactagcaagtaccctctggcgttggcaatattcagtttgttgaaggccttgatgaactttaatgaagtggtgagagttaaacaaagctgagataggatatgaatctcagggaggatatgaggactcattgattaccattccaagaaacttgtctgaaaaggaaagaagagatggtggtaatcagagcagagtggcaggatgcagggagtttttatttatttatttgttcttgttgctgacattgttttcatactattttttgtttgttaaagagggagagttgtgagtataaaataacctataaatagggaaaaccaggaacagattcatgtgaaagcccttgactgagaacagaattaattacccgtgcagaggtagtcttcaagccttggcaggtaagcaactgtctgagacacagctggctcgggaacagggcctttctttggctggcaggcttgaggcagcataatttggaagcggatatgagaaagggcataataatgtgaaatttgactgcctagtgggggagaaactttgaatattatgaggcggttatgaaagtatttccttcttatggcttcaatggcactgcctctgagcattagtgtttgtcctcaggaggtaagtgtggggactgtatcagcagttactacctagataagcacggtgtataggggtaacatggtttatagagcatgcaagccttcacctctttgctagatgagatatggaacctaaattcggagaccacgtgacccctgaggcatggggaggtggggtcagaaagcgttactggccatgatccagacccaggcgtggagaaacgacctactggggttttcagggagcaggaaggtggggcaggtacagagtatattctgggggacagtttcataaaaagtgagtagatctccacaacttagtttctagactaaatggactaagcatgttccgccctattcttcctactaacaataacaaaaagctctggacaaaatttataaagcaacccacagaagactccgaagttggaaaaagaaataaaaactggcgatttcctccatactcaaggcatcatgtagcagggagtgccttgggtgttgtttatgtgtttgttttcttttgttcattaatttttttctcccgtgtatggcagtgtgggctctagcaatgcctaccacccggaaacacagatgggtacaaatttaaaaaccccaagaaaactctttttagccaaatgaccagtgtttccagcagagcaaaaacattttgaccacatctgcccttttgtgctggctaaccccttcccctgccaccatgtgctgctggggggacattgtggatgaagcccactcatttattcctcctcctgcagtaatgtgaccatacccttcccactcctaactagaggctgggggaggactatgtgggggagagaactggagaaagcaattttctaaatttgtgtatgaaatcctggttagaactctgagtgccccatgcacaaaacagacaagaaacaacacagcaaaaagattcaagggtcagaaaaactgaacactggtctgaaacactgcccgggtttcagattggcatcagggtagcacccaagtggggcagattgaaatagcactgtaaaggctttgaaaatgaaatgacttttgagccacagctcacaaagtgaaccggaacaagcattctgaacttaaacaggtcaagtgcctgctaaaatcaaagactgaaatgggaaccagaataatataacatactactgaaaatgtctaggatgcaatccaaaatctcatcacactgaaaaccataaaaatctcaacttgaaagagaaaaggcaattgtaagcattgagattacacagatgttgaaactatccagcaagaatcataaagcagctattatacaaatgccctgattttaaagcaagtatgaatgctcgaaacaaatgacaaagtggaaagtcacagcagagaaatagaaaatgtaaggaagaaccaaatggaaattttaaaactgaaaaatacaataaccagtttttaaaaattactagattcagagggaaagaccaacaactcagaaaaaatgggcaaaggatatgaagagtttacggaaaaggaaatgtagataactcttacccatataaaaatatgttcagcctcactcatataagaaaaatcaaaattgaaattacactgagacactgcttttcacctgtcagaatggcaaaactcaaagtgtgaatatacgctatgagaatgtggaaaattctcatagattgcttgtgggcatctagaacaatttggttgaatcactaaaatccacatgccatttggccctgcaattctacttttagaaatttatcatataggaaacctgcatatgagtgaaatgacatacgtggagtgttactcctggctgcattgttggtaatcacaaagaacactagaaaaaacttaatgtccatcaataagatgctgattaaattaattattatacgtcatacaatggaaagttagaaaaccgtaaaaaaatgaaaccctctctataacctgctaccatataataaataaaaggacaggcaatgat

SEQ ID NO: 16178 - DNA, 1269 bp, Homo sapiens
gggcagcctctggcttgggcagggtctgtttggactgcagaagcaagggggtgatgtagcccatccttccctttggagatgctgagggtgtttcttcctgcacccacagccagggggatgccactcctccctccggcttgacctgtttctctgccgctacctccctccccgtctcattccgttgtctgtggatggtcattgcagtttaagagcagaacagatcttttactttggccgcttgaaaagctagtgtacctcctctcagtgttttggactccatctctcatcctccagtaccttgcttcttactgataattttgctggaattcctaacttttcaatgacattttttttaactactatattgattgtcctttaaaaaagaaaagtgcatatttatccaaaatgtgtatttcttatacgcttttctttgttataccatttcctcagcttatctcttttatatttgtaggagaaactcccatgtatggaatcccactgtatgatttataaacagacaatatgtgagtgccttttgcagaagagggtgtgtttgaaatcatcggagtcagccaggagctgtcaccaaggaaacgctacctctctgtcccttgctgtatgctgatcatcgccagaggtgcttcaccctgagttttgttttgtattgttttctgacagtttttctgttttgtttggcaaggaaaggggagaagggaatcctcctccagggtgattttatgatcagtgttgttgctctaggaagacatttttccgtttgcttttgttccaatgtcaatgtgaacgtccacatgaaacctacacactgtcatgcttcatcattccctctcatctcaggtagaaggttgacacagttgtagggttacagagacctatgtaagaattcagaagacccctgactcatcatttgtggcagtcccttataattggtgcatagcagatggtttccacatttagatcctggtttcataacttcctgtacttgaagtctaaaagcagaaaataaaggaagcaagttttcttccatgattttaaattgtgatcgagttttaaattgataggagggaacatgtcctaattcttctgtcctgagaagcatgtaatgttaatgttatatcatatgtatatatatatatgcactatgtatatacatatatattaatactggtatttttacttaatctataaaatgtcgttaaaaagttgtttgtttttttctttttttataaataaactgttgctcgttgcatt

SEQ ID NO: 16179 - DNA, 362 bp, Homo sapiens
gctggtggacggtgatgaggaaggacttgactggggatggcgcatgcatgggaggaattcatcttcagtctaccagcccccgctgtgtcggatacacactcgaatcattgaagatccgagtgtgatttgaattctgtgatattttcacactggtaaatgttacctctattttaattactgctataaataggtttatattattgattcacttactgactttgcattttcgtttttaaaaggatgtataaatttttacctgtttaaataaaatttaatttcaaatgtagtggtggggcttctttctatttttgatgcactgaatttttgtgtaataaagaacataattgggctctaagccataa

SEQ ID NO: 16180 - DNA, 74 bp, Homo sapiens
actagaccagtcttcttgcatgtctcctgggggagacagggggttctactcaaataaaactgatgcctacacaa

SEQ ID NO: 16181 - DNA, 3428 bp, Homo sapiens
atgtcatcacaaactctgccaaatttgtggaactatgaaatgtattatttgtagacataaagacttgattgctttccagtttaatgaaagcttaaatgtccctgcgaacccacaatctctgccagcagaactggttttgttctgaatagtacagattgatgtgaacacaaagcattttgtgtaaggagaacccctttcttttaaaagaagtctgtctatttcgaggggagttacaggcaagtttggtaaaagttaagctagtatcatagtcatttaaaattgtaatagatcttaaccattttccccctcaccctaactctcttattctgccgccacaatgcaagcatagtttgatgttttcgttattgccttttttgagatgtatgtatctgtatctacctatatctatatgtgtgtatacatatataatatatacacacagatacaagtgtacacacacacaccacacaccacacacaccccactggcagtctttgtggattaggatgggggtgacataattttcttgagtttaacaggagtgctttacccaagtcagtcatggatatgatatcactgctctttatttaaaagtaaactttgggcacaggaaccatatgggaacattcagcttgtttaaaaaaaaaaaatcagaagttcagagcaccttttcaatctggagcccttaaaccataagtccaaatatgaattatttgtgaacagttaatgacccatattagaattttacaatctggtgaacaatctgggtaaaaggctacctttaattctaagcttcatttttttttgggggggggttacattttaatcataaattcttttttgcaaagcccaggttcttgttccacacagtgtaatgtaggtgtattttggacagcacatatggtccattgtgtacaagtcagtaatctggatttcagtacatggatttaaaaggcaacaatccatcactggtttgtgtgtttttggttaagtttctggaagaatacaatgcttttatattggaagtataagttttgagtggcattgttgccttctaacaagctctctgggacttttaaagttttattactattattgctaatgtatgattatggtcagagactttcaacccaccccttcctgcctacccctggcttttcctcacaaagaatgtctagacaaacagcagcttagtctcctgacacctcttgtggggtgcatgttcctgctccaggtatgctgttcatgtggattcattccattcagtggccccttggggtttgcatgccagtgaagcgttaccatagaagagccagccgtttgtgttcgcttggtaggtgtaagtaatagcagcccttagccacggagtctttatgtggtttattcctgcaaggttgttttaaactgaaatagaactgctagtgtgattggttgatcagcaaaacagctgctctcattttgttttggaggaaccctggtggtttgacagccaggagaaaggccatatgtgaaaccagtctcttgtggagattggaaatcctccctgatatttgggcagagcctaaacgtgcatgcttgtcactcaaacaccagaagtttgaatcagaggtctgagtgacctcttttgtggctgttcttgatggtttccaggcctcgttatgcatggtttgcttgatgcccattttttgtgccttgtgctgttggatggtaacgaccactcaccatgtaaacacagtacctcagttttctgtccacagctgcagtcgctctgtccctcgtgcttcactgtgggcagccagggacaagcttctgaaagcagtgtgatacccaagtcataggtgcttctcgtatgtgaacaggtgtcattctacagatctgttatgtgttttcctgttgactcttaagagtccctgcatgtaaatctcaaagctgagcctggctcccagagtccagactgacattacagcgcaagagtttgcaagtgtgtccagcatgcaccaactgtgcagaacttggctcggtaactttgcgtggaaaaataaagtacattttgaagtatcttgagggttgggtcaattgagacatttctagcattacttaatgacttgcattgtggtttttctgcaagcaactttaatgactttttttataccacatggtctcccagtttctagatgaatgcaacatgatgatggtgatgatgacgatgagtttaatcattgttcatttattgcctttagggctgagggaaagggaaggtttgtttttttttctccccattttcccccattctgtctttcttttggtgacttacaccacatgtaatgacgctatgactaattctgctcccaagcccttgtatcttgggcttcattttaggctcatgtgtcagatctgcatgcattgcttgcatttttctggtatctgaatgttggttccttgttccaggaattcaacattaatttccaaaagtatcatgggacttgtgacaatacaagacatgaatctatgtataaaatttatcggcctttctcatttacctgctctagtattattgtattgtgtgtgcgtgcgtgtgtgatgtcaggctgccacgtaaaacttcagagaaaaatcttaaaagcagaccatccttttttgcatgctctattctaagtagaatgttcaatgtaactgactaaaattgcatgttaaagatatttaggtttttttgttttctttatttttatttgttttcagtttcctgtatatttgcttactgtgccgttttagtggttttaggataaaaatgcactggtgaagcaaatgtagtgccaacagaaggtgattttccagttgtaaatgtcatgcagcatttgaagggactgtgttttcttaaaaaaaaatcacagttacttctaaaccagatttcatttcttttattgttttatgtgccaaaccacgaagtgcattgggcttcaatctctgaacactgtagacccattagaagactgttccgattgttacaaattgtagtgcctgaaaacactcttaagctgattgtcttaacaaaatgaaagttctccaaagacaaaacagaacaattattataacaaaataattatggttgaaatgtctgtggttccttggaaatgctgcgctctttgtgtttttccatcattagtgcagttggaatgaatgtgtataggtcagaggtcttcgtgttcacattttaaaattaggtaaatgacctcatctttcaagcttgaattcatttttaattttaattttattttatacaatgtgtagacagttccctgttctctgcatttagaagtatacacaatataaatctgttaattctgtaagtaatttttataattatgatgtaactctatcttatccttaaaacatttaaaataaaccctttatgtgcaactcctgactgt

SEQ ID NO: 16182 - DNA, 700 bp, Homo sapiens
ccattgctgtgaattacgtgagggaaagatattgaagaggagttggacactccgagagtgcagctgttctccccccgcaccatccgtgtcctgcattctgcgagtctgtgctcattaacaatgtgctgtgaccatgtgactcagcaatcctgctgctgggtatatacccgaaagaaaggaaaaggaagccagtatattgaagaggtatctgcacccccatgtttattgcagcactgttcacaacagccaagatttggaagcaacctaagtgtccatcaacagatgaatggataaagaaaacgtggtacatatacacaatggagtactcttcagccattaaaaaaatgagattctgtcatttgcaataatatagatggaaaaggaggcccttatgtgaagtgaaataagccaggcacagaaagacaaacatcacatgttctcacttatttgtgggatctaatgatcaaaacaattgaactcttggacatagagagtagaaggttggttaccagaagctggaaaggaaagtggggttgggaggaaggtgggaatggttaataggtacaaaaaaatacaaagaataaataagacctaatatttgatagcacaacagtgtgactactgtcaataatcatttaattgtacatttaaaaataactataattgcattgtttgtaacacaaaagataaatgcttgagg

SEQ ID NO: 16183 - DNA, 4152 bp, Homo sapiens
caagttaggcttccacagtgccagggcctggggatgctggacgtgggagagggttgtggtcgttagcctgggaaaatcattcttttaaacaatattcgccggaaaattagttttttcctaacatttctcaaacaaggcaattagggccgtcagaatcggtgctggaagacgaagtccccacagtgcaataatgaggttcccacggaaaatcagtacgttgtgttcgtaactgagataacagctagagaaggggctttgggctttttgagtctcccaatagtcagtctctctctctctctctctctctctcttcctctgactttctggctttggacactcccaatggtatatttctttgtggtgtttttatatttggatataagagaggaacttcttgttggatttttaagggaacacacttcgttttgacccttccaataaggaaaggggagctacaggaacagagagctctttagaaggttacttttaaatggaggcccccccattcatggtacccactcccacttggacctctgagacctccagaattaggcatcattctaaaatctggacattagaagtcacagactttgtatataaccacatattcataatttatcttttcaatgttttttattcatagatgaaaatcttgcaggcatagttaagaaaaatataattcctagaaagtacaagggaaggattatgctctgcagatacatgactaacaaggatagctggccatgcccagggctggtgttggttgaggaggtggtgatggtgcggggcatgtgtgtgtgtgtgtgtgtgtgcgcttgaggagttgtggaagtgttcatatctgtaaagtattatttcatggatgcagaccttaatgctaggttgaataactttgttgccatagaagaagaaccgcacgtcaggcttttttcattagcaaaccagtaagcactcactttgggcctctgaaatcacttccatcacctaacaccagagatacaaactgaagctagcccttaagagcctccccctaagatttagagagaatgatttctcaaccagttttcatctttgaaagtgccatttctccctttatcattgtgatttttattcaaatgcatgagtctctgattttctaccatatacaaagggtagagactacagtttcctatagaagaaacttcacatagtggccgaaggatcttatttctcaaaattcaggaactggtttcctctttctggaaattatgacattaacttgatttcatggtatctctttcatcttcctcaatgcctgtgctgtatgtatatttttattatatactgtaggtatatttttattaccaaaaaaaggagaatttgagcatgccacaatcttgaaaaatctgaggttgccctgctgtagaaccctttaactgccaggactttgtactgtttcccaagtgttaccagagccaggccgccagccttatgcagtctgtttaccttagctggaaccagggtgctgtgctgtgggttctatgaaactttctgtttcttcatatttggctttgtaattcctttcttatcagttttggaggcatttcctattattcctctgccatatgttttctgccaaattaattgccttaagattttccttaagcttttggaaatgtataatgtttgagaaaaaagaaaaagaatagactgagtggaatcgtatctagtttcagttaataacatgtttcagttgatgttactgttatagctactgggcataaagtctccttcccttttttgaatcctatttttgaggcattgaagctgtgtctgtaagagacaataggccagttgggttaaatcagtgacgagattgtccagtgcagattggtgcccagtgagtggatcttcactgctcacaggccggactggggtcagctcacacagcgaggtgacggtccgctcctcaagcagtggatggtgctcttcggccttgcagatgccgctccattttcctggcttcaaaattttccagatatttcagtgcccccagaatgacatgctaacattctgctggcatgggagcatgaggcagtttgtctctaaaacatgccagagaatctcttgtcactacctaggcaaagaaccagtggcaaggtggcagcctcccaaagagctcatccctaatgtgacatcctggaatcagatggcacggacaccggcccagccccttcccagctctgtgactaaggacaagtgacaccccccctcccccagcctcggtctcctcctgtgtacattcagaaggcagatgctgccatgaggccatgtgtgctatgtccatggtgcaaggtggcacgcatgccgagtcaccaggtgagactgccgctttgggaagggataggaaggatctccggtagccttcgtgggcaggatgcctcttatttgaatgtgcctttagccacctcacagagcctatttccacatccctgtggattcatccctgtggaaatcttgagaatcatttatcctatgctgtcatgaagcagcagcagaatggagaaggtttaaaaagactcatggacaggcaaagcggtcaaacacctcctggctcagacgcacttgccttcccacacacaagtctggaagctcaggatggtgttcacggaggcagatgctcggggccggggcctgagtttcctggggcacagcctccatatctggggttccctggactatgcccagatagctcataatgtcccagccttatttgtgatggagaaggacttggggaaaagccaccgggaagcagtaagtctaaccagggaagtgcactgacttgcatgctttgaagaagagaagggagaaaagatacaaaaccctcacctggtttgtctgtaacagttgttatttctcaggggagctgcattaatgggccaagcctgtgcagctgggtgtgtgaagcatgcattttgcaatggactgtctccaaaagcagagcgaggtcacccaagaaatctagagcaagggaaaatactcattagcaaaggaattttgctggagccttgtaacggccgactcattatttcctttccaagttattttaaatgaaattttaaaaaacatcttgctttccaagaaattttgcttgttggcatatgtttggtgttttgattcagtttggaggatgaactagttaatttccctgggagtacatgcctattaaaaatatagcatcctgcatctgaccaagatgctatcttactatcttattgtgcctatcttttatgcggagagagaaaggggggtgttgggaaggagaccagactgtggaaacattttctttattttttctctttttcttccttttatagtttgtttatttttcaacttgacatgggtagagaaagcgaatcgctagtatagaaagcacatctggaatccatccggcctcctctctctggctcaccctcctcccagcaatgtttctccttggaagttgggggaaggtaggcacctctgaccttggcagggtctaacttggggtcatccactgcatactcatcttccagaaggcgtcttattcctcctcgacaaaaaaaaaatgtgttggtattaaaatgctttgaggtaggctggatgaacccagcttagtgaggatgacatgaaaacccttagctaatggggtctttattgagtagaactcaggtaagttcagatgtaagcagtgtctctcagtaaacatgaaaagactgaagatgcagacaatcaaatacttaagtctcttgaagagctgggtggtgggcgggggtcttcccaggtggtcagggagatgtgttagtgtagcacttggaagagagtggaacgaccaggcaaggatgtgccgtggaggtgggcagtgggagcagcccagtgtcagcatctgtattggttagaagaccaccgctaatgaggaggagcgtctctaccctgcagctgtctgtactcctgtgtcttccgtaatgtgccaagctctctgaatatatgcaaaactagtctgcaaaaagccatatgtctcagcatctggctttatttctaagtgttcaggtggaatttaagccgcgatcaaatttacaatgtcactgccagctctggacacttacttttggaataaagcaaagagtgaacact

SEQ ID NO: 16184 - DNA, 2672 bp, Homo sapiens
tcgtctccatgcgccctgctctgcggctgtgttcttatttattgcatgcgtcgcttccacaggggcccctcaagagctgtgactcgggagagctaccttactttgaccaacagcctgcccagtgtggatgtctcttacagagggggcccaaggaatcaccaccccgcttcagtgtaaacaacgtgccttgtccactttgggctccagagtctttcagatgtactaagctgctgacatcatccactgccttctgctgcatcctagacaccctccctgttgttcacagagagggaaggtcgtgggccacacaatgctgtgtgaccctctccgtgtgcctctgaatggtgttttgatgattttacactacatttcctgtgcgtagaatggatgcttgtatattcgtacatctctatgttacacagaatttgtgttgcaggtgtttgccatgtggtacctacatagaatctccatacaacacacaggtaacaggttatacaagtggattcagactgaacccccagtacaaggacattgttttgaactaggtggacatgccatccctggtctccttagactgacatgattctcatgttaaccaagttttaaaagttcaaattccccaaaaaggcttgtccaaggctggccccagatgtgtgggtctgacccacaccagccctgtgtcctgtcctttcagtcatttgtccctgcgtaattttaatcgtattccaaagcccaattatgtgatggttttcaggtttctgcaaattacagaagagccagccaagatcacccaggagcttgtgcccccagatgggccaaagaaagagcctatgaaggagaagcagaagcagacggctggcctggctcaccttcccacgccagtggggcaggggtctgcttcaggaaatggaagctgtccaggaaatgagcagagattcacaagacagcactttgattctatgttgagtttgtttctatattagaaaagcagcaagtcagtaatcccccgtggcatcacagctaagtagctgtggccaccggcagtttcacagcatcctgaaagctggcactgatcgtgactatcagtgaaagaagtttaattttcaggttagaaaatgtgatctggcagtttatgcattcttcagagtaatgtaataatacctatgtgatgctgtaattttacttttcaacataagttgaacccgtagcagtctgtttaccttgtaaagggattacttagaagacatttttgtacatgctcttccccaaggattgtacgtattatacaaatagatggaaagaaaagtgaacacgtttgtagaactttcataagcacacagttgctgtgttgagttctctttaaaaacaaggacaaaaccaaccagcgttcaaaggaacctcccatcagagtcccctaaagtattttaggttcagtgagcatttgcctgaataaaacctaaaagagtagtcttaacacattactaactttttctaagagaaattgattcctgttttgtcatctgatgcaatttgctcttataaagagacattttcataggttcagagtaactcacctccatgggctgaccaaaggcttttctaatttttgttactgatgagatgaaacctatttgtaaggagatcttccccaggagcatttctgttgccttcttgacatcaatgaaaagtagcatattctcttatgaaatagcatgagaaaacacagggcatttctaggacagtaaaacgttaaagtactggattaagaaaacaacaacaggctgggcgcagtggctcacacctgtaatcccagcactttgggaggctgaggcgggtggatcacctgaggtcaggagtttgtgaccagcctggccaacatagtgaaatcctgtttctactaaaaatacaaaaattagctggatgcgatagcacgtgcctgtagtcccagctactcgggaggctgaggctggagagttgctcaaacccgggaggcggagattgcagtgagccaagatcgcaccgctgcactccagcctgggtgacagagcgaccctctgtctcaaaaaataataataataataaataaaacaacaacaaaatgcatcagagagccaaaacattcagtattgcattttcacataggtgatgaaatgactttggaactttatctgtgttatagttatgagttgctttgggagacttggagctctctgtagctattgttcataacactttgctccataaccctgatgtccgcagtatctaagtatctcagccttcatccattaactctactagggagcccacagccaccatttccactaggaggtatcaatatttgtggtatgacataaggctcccttgaaataacaagacttttgagcaatctgaattaaaaatacatcaaaaaagtaatagcgctcatttgctaaatgcaaaaaataatcacctttgataccaatgtgcaccaatatgcctaactagctagccagctggagataatttaccagggaatgtttcaaagccctaaccttgaagtttggaaacaggtggtcttctatgctgcagagaaactatgcattaggtctcttttcaattagaaacctttactatttccaatgtatgtttgttaaaaataataataataaaaccaaaagcctttgtggaaaccc

SEQ ID NO: 16185 - DNA, 277 bp, Homo sapiens
agtttatctggggatcgtcaaatctttttcaaatttaatgtatatgtgtatataaggtagtattcagtgaatacttgagaaatgtacaaatctttcatccatacctgtgcatgagctgtattcttcacagcaacagagctcagttaaatgcaactgcaagtaggttactgtaagatgtttaagataaaagttcttccagtcagtttttctcttaagtgcctgtttgagtttactgaaacagtttacttttgttcaataaagtttgtatgttgcattt

SEQ ID NO: 16186 - DNA, 822 bp, Homo sapiens
gagttcttgcctgtgtgtctgtattttgggtaaggaggggaggtctgaaaaagactttggggctttttcttctgtttttcatgacaatgtaatttgtgtaactgttgaatctggaaattgatcagcattaaagggcacatgaagcagtgtctgcaggcgttcagtgctgcggagcctgttaaaggtcactcagatgtgcaggtgttaatcttctctaaaagcctggtgatacagctctggctttctgagcacactacggatctggaaaatactggaaaatgtgatacttagaatactttggctgctaaggaaacttcctctccattgcagaatagctgagccaagtgagtgagtttgcagaaagcaggtggtgagctcctgcctgctggaggttgccatggagggccattcctgcccggcaacagcaccgtcctgcagggagccacttggcagaagggtgcagggctgctggtgtcagagcaagagggctacagggaaagggccctttctcaggggatgtagcttttttaaaagatttgggaacacttggaggatttgctaaaatgagcctcagaaggaaaattggttttctaacctgtgactttttgaaatgaattattcctttcagtctttatttttcaaagaaacaatgtgtattgaagtacctagatttgtttgataatcaacaaatctttcctttttcaatgaacatattctgaatgtggtttctgtcttagaccaggaggacagagtttgctttcatattttccctgtaagtaagagggcttatttattttaaataaagagtaattattaaatttt

SEQ ID NO: 16187 - DNA, 473 bp, Homo sapiens
cagcccggcggggaccttggtctgatcgacgtggtgacgccccggggcgcctagagcgcggctggctctgtggaggggccctccgagggtgcccgagtgcggcgtggagactggcaggcggggggggcgcctggagagcgaggaggcgcggcctcccgaggaggggcccggtggcggcagggccaggctggtccgagctgaggactctgcaagtgtctggagcggctgctcgcccaggaaggcctaggctaggacgttggcctcagggccaggaaggacagactggccgggcaggcgtgactcagcagcctgcgctcggcaggaaggagcggcgccctggacttggtacagttgcaggagcgtgaaggacttagccgactgcgctgctttttcaaaacggatccgggcaatgcttcgttttctaaaggatgctgctgttgaagctttgaattttacaataaactttttgaaac

SEQ ID NO: 16188 - DNA, 595 bp, Homo sapiens
ccgctcccgcacctgtcggtggctgcctttgatcacaggagcaatcacaggaaaatgtatccagaggaattgattgtcagccacctccctctgccagtcgggagagccaggcttggatggaacatgcccacaacttgtcacccaaagcctgtcccaggactcaccctccacaaagcaaaggcagtcccgggagaaaagacggatggcaggatccaaggggctagctggatttgtttgttttcttgtctgtgtgattttcatacaggttatttttacgatctgtttccaaatccctttcatgtctttccacttctctgggtcccggggtgcatttgttactcatcgggcccagggacattgcagagtggcctagagcactctcaccccaagcggccttttccaaatgcccaaggatgccttagcatgtgactcctgaagggaaggcaaaggcagaggaatttggctgcttctacggccatgagactgatccctggccactgaaaagctttcctgacaataaaaatgttttgaggctttaaaaagaaaatcaagtttgaccagtgcagtttctaagcatgtagccagttaaggaaag

SEQ ID NO: 16189 - DNA, 2004 bp, Homo sapiens
ttccaaaacagtgaacgtggaggatgaagatgctgcgtggaggaacatgcaattttattcaatataaacatttgctattttctgcttagaaaccacaccctgaagacgtgctgtctatgcagttatggcacattatatggaaactctcatgacatgaaaaataaatacaactagttaagtataaaatgccaaataaaagtgacacgtacaatgtggtttataaaaataagcttaacatctgagaaaatgtaccaagtggttgtgtgtcctcagatgtgtggggaggatccatcccccacccactgcagcctcacaccgagtccaccttggacatggtggccacattactcagctgggagaagccacccttatcctggttcctgcctcctgggggctctggagacggatgcctatggcgcctcatctttaaactgtccttagtagcccaggggagccacaccctcactccctgcctccccccggtccgcatggtggcaccgtgaggcagtctcagcaagtcctcatgctgttcttggtcttccacaagaaagtgaagctgtcagcttaataacaagaatggcctaagacagcaaagacagcactgttcctgggctgggacgcaaggaatgaggtcctttatgaaagaaagacccccctgcatagcctaagtgctatatcgatcgtcccggatgtgccttaagaaccgtgacctcatcagtcgcccatttagcattgttaagatctgtgaacgcgtgttgtctcaaaccagtcagggccgtcatgactacgcagcagcagcagtttccaagacgggccagaaacgcatccacagcagtggcacccgcggctcaggggctcctcacagcccgggctggtgggagccaagaccagacagagtgggggtctccatctgttttctcttctccctcaaatacaggctgttttcatcgtgtctagtccagccctgtctgggccctgtgctaggcaataactcttgcagccctgaaggacctagggagcccagcccaccttcccacggactggggttccctcacatgtgcacttgaacccaggacccagcatcctccacacaccgtgacaatgggcaaaatcatcccaaaccaggctgccccagccccagcccagcaacagtgaactcccttgggtcaagacagtactcaacggccactacctccacgcttcccagagcctgcggcttgtccgtgagctccgtgcacttcaccaaagcccccatcccagcacacaggacccgtgtgtatgagacggtgtcattggaagtgagaagaaaacagtaaaagtgtccagttagataagtatctttttgcacctctgagagtagaattagaagtaaatatgacagaattgaacaataaattctagaagagttgccttgattcaaacaagtataattctcaagttatcacaaaatttcccacaaaaatttacaatcagcaaaatagtttccttatttctcatgtatcattttcatataattccatggtttcactaatattatatgttacaataagcctccattagtccctcaaaacgatgatataaataagtctgtacaacctagcatagaataaaaaactgaaaccaagattcccaacgtttttcatagcagccgggcacactttggtgaccccaacgagaaccctctcggcagcagccaggagctgttcaccttccagaagcagggcctgtggcagcctaacagggagaggccacggggcccaaaaacgcaacacgtctcaaggcaaacccgagggaggaacttggtctgggaggaagagagaactcgctcctcaaccaccccagacactggagtgtcaggaaagcactgagctgttggggcacactgcccagcccggccacagcagctcagccagtcacagctccacctccaacttctacagcagcaatttttagtgggaaagaacagctcatctccccctcatgtgaaagattaaattgtaaagc

SEQ ID NO: 16190 - DNA, 647 bp, Homo sapiens
gctgagtctcccactgccctgcacaccaccacattggacctgtgctgtcctgggaggtggtgttggaggccccatgaagagcgccctggactgctgagggtgggccaacagcccagagctcaggacacttggctttggggggaaggaaactgaggcccagagaggggcaaccactggccaagggtcacccagcaagttttggctaagagcctggcctccagccccagcagtgtggcccagagcaggggccgactgccaaagtaaccatcatccatatgggccgtgtggtgatgctggcccggaaggcagaaagaggcagcatgggcactgccagggacagccacatcctgctggtctgcagcgtggtccaccccgcctctgcccagcctgtctacaccgtgtgagctgaatcgtgacttgcttcccacctcctttctctgtcctctcctgaggttctgcctgcagcccccaggaggtgggcctgccccatcctagctggactcatggttcctaaataaccacgctcagaagctctgctaggacttaccccagccactgagtggcaggcgcatgagatttgtggctgttcctgatgctagtggcacacagtgcttatctgcataaataaacactggccaccagcagtg

SEQ ID NO: 16191 - DNA, 385 bp, Homo sapiens
ccacgcagtgaggctggtgcccatgctccacactgggaggccaggctgaccccaccagccagtcagctacaactccacatcaactccacatgcgcccagctcgagactgatgagtggaatcagcttccaggtgtagggaccccttgaggggccgagctgacatccaaggctgaggaccccagtggggagtgttctgttccggcatatcctggccgtaacgatttttatagttatggactacttgaaaccactactgagggtaatttactagctgtggcctcccactaactagcattcctttaaagagactgggaaatgttttaagcaaatctagttttgtataataaaataagaaaatagcaataaacttcttttcagcaactac

SEQ ID NO: 16192 - DNA, 175 bp, Homo sapiens
cagaccctggacccagggcctcacctgccactcaaccaaagagtcctcgagccggcccgccaaggggactgctgcttctttttctaaatgcatatttttcattatttataatttgtgtaaaaaacacaccttcaccttacaaggtgctgaccatattaaatgttcaggttctctc

SEQ ID NO: 16193 - DNA, 179 bp, Homo sapiens
ccccgcctagacgccaggcccacttcacgccgtctaagtggagaagtgacggaccctcagggccagctgctcctcctgtccagttcacgctgttttgtaaccactttctaagcattttttattcacaattggaaacacaaatgtaatgcaagaataaaaaatattttggggcagaaagg

SEQ ID NO: 16194 - DNA, 1574 bp, Homo sapiens
acttattttttatagagggtgaaggatgctggaagggtaaggatttaggaatatctggagagaaagagagcctgcagttatgtacattttgtcctttccgtaagagaaaaatgaggactttggaaattcagatccctctttgatatcagagatttaaacaacacatttttagttttaaccagttgtagtcaaaatgctacaataaaacaaaaaagagaaagaaaatgaagagcatttgactcccgcacttaaaatgaagtacacataaagtttaaactggttatgacaaaagcctttagttgtgtttcttgaactataaagaaaacaaattttggcagtctttaagtatatatagcttaaaatataatttttagcatttggcaccatatgtatgccattatatttgattttgcattactgtttcacaatgaagctttctttaaggctttgatttttatgattatgaaagaaataaggcacaaccacagtttttctttcttaaatttcatcactgttgatgtggttcttttgtgttaaaaaaaaaaagtgcaactatcaaaactaaaaaattatagagtaatattgccgttctgctgattttaaatatacaatacatcatacatactttacaagcaagttaaatggagataaagttgaaatcatagaagatgcaaatgacctttcaaaatcaacacaatgtgttctgaaactttcgtgactaataccatgcatctgtgatcaatgaactatgtggttttgaatcggatgtagaccattagtactactacttgagctaaacttctgcatggttcataatttttaaagtgtgtagttaatatgcatgttatcgtcctttcttccattcttaacagtatgtgcccatttgcaaaacaaaaatgctaataatcagtaatagtcctataaaagatgttaactctgtttagtcattgactgatcttgctctaaccttaaaattttgtgattattgacctctgttgcatttattctaaagccccccaaaaattatctagccgtttcgaatatcaacattaccctggtgtattcactgctgtatgcattattgttctttgttgctgttttatgccttcatattagcaaatatgaaattctgtgaaaaaaaaccctttgatcttaaaaaaaaaaaaaccaccccccccttctgtagcaggaaacaaattgcttgttcttgagaactttcccatcaagaatttagtagaagcaggtatacttctatcattttgatgtttttgttaatgtttccaaacaatgtactttgaaatcagaatcacttcttatcgttttcatatacttctgatgctcttcatcacattagtgatcagaaatgaggtgtaattccccaacccctgcccgcaagagctaagtaggatcttactgtaagttgaagggagttttgccctaactcatggattgtgcaagaatgaactgctgttgggtttgattgactgtcgatggattgtggtgtggtgtatctgaaggctattgaatgcaacttacaatgcttaataaaaatctttattcttttagtataaagt

SEQ ID NO: 16195 - DNA, 1909 bp, Homo sapiens
gatttggaaagccaggatccttctgctccgctcaggacccccggagccccgcgaaaacatctgcctcccaggagggtgccgagctgcctcaccagggagggccttgcctcttcccggctgccatctccccaacaagcgtctgtcccttcagccggcagagcgagcccagcgtggcccctcaatttgaaaatggacgtcttttctcaagttgctaagagtgatctgtcccagaaaagcggccctgcaagtttgaggaccgcttattccactttaaggacagccttcaggccccctgagcgtgggtgtgattgcagggcctctgcagctctgctgagagcatgagtccttcaaggaagacagagtgagccaatgctcaccagccccagagtcagagctggccacaggctggcagcctccaggggcttaaaaaaaaaggcaaagaacacagaaagaggaggagcaagtgggatgtttatgtccccccttctcttcctgagtgattctcagccaagtccagacagtgctcggcgggtgaggaagggtctgccccgagctttctggttggcaggtggcagcaggatggtgggtgttcagcctgaatgcccaggagcatttctggggggcagctaagactggcagctgggttggtgtgttagcgggcaggggagccattgtggggtccccaggaaagggcaagggctcagccacatcttggggtctgggaggcccaggctaagccatgtggcagggaccgtcttgccctgctggccacactctggagaagcacttctcagccaaggcacccctgccctgggactggcagggcaggggcaggggcagggacagtggccaggcggcccgaggacttacggtcggcacttctctgttctcccgtgtcagcgtgtggtgtcgcctgcatgggtcgtacctggatggtgtgtccaccatcgacacggaggggctggatttgtttctcaggcaatcctgtattttaattttagatgtatttcctgaagcatatttttcatagaatgtagcgtgtaaatagctttttaaataacttcttttttataagagtaaaagtatctttaggaatttctttctatagagttcttcattaacatttatacgagttttttgctgagtcagatggacagttgggttctgatgctttttccttctcctttccttttattattattatttttttcttttaagaactaaggtattgcctgaaaaacaagtgatgtctgtgcagccttacactctgtctttacagaagcaaatagtacacaaaagatctatttcagacacattttgaagatgaatcttcaactttaataccagctctttgttttccttgtatgatgaggggattgggggatacagttattttactagcaccttgtgaagtgtttccgtgttttgtgatgctgtaatttattaatgtttgtagctttttatatttgtacatttcttatgagctttgtttatatacccattacctggatgtttttgtccactgggagaggcagcttggtggaggccttatccactcccacttgtcctgtttggagggacgcagtccctagggcccgagactgggtgggagagggggagtctcacggggccccaggcttattcagaactggtgtttttaaagtttcctttaccctgcccttgttgaacatttatataatctaacctggacatcaagctgttctctctctctcttttttttaattttattattattattttggcaacatgtacatttctaacaaagtttatcgtggctattaaagtgttttatttcccaattcatattactcttgtatcgagtccatgaggtctaaggcaacttagatcaaagttttaaaaaagtaaaaatatttcaggttttgtacag

SEQ ID NO: 16196 - DNA, 1910 bp, Homo sapiens
ctttcactcgtggtgaatatttcagacctaaagatccagatagtatctctgttcatatgtgaataagttgaagattgtggggctactttttctcatagcactttattttgaatgttgttagtttgtgctgagaatggtcgtccgtatttgaaccaattatttattttaaaatatatttaagctacatttttgttttgaaaaattgccataaatttggtgccactttcttttatttatttgactgagttaatattattgtattaacattttaagtatatggtgtttacattcttatttcttttgacattttggaaataatcataacttgtctttccaaaataaccattttcttgatggaactcttcctagagtttttaccaaatagctaactttagtagtaaaacctcattgtgtatccattcccccacagatgaactaagaaagtcaccaagtgtcttaagctgttttatatttgttacgaagaaggctattgctacaatatttttaaaggtttcttttttaactttgaaattttttgtttttccttttctttttataaatgtaacagagggtttcaaagcatattatttttcagagagatttagttttactttaatggagtgactgtgaagtggttgggattttttgcttgtagaaagtagacttgctctttgtcagatttccaaacaaccttgccagccttggctgtcaaaaggaggcaggagcagttctcaacacaccaagccttattcccactcccttgggttgctgctgagccaaatagcatctttacagaggaagtgggatcagaggcaggaagtgtggaaagttgctaagaagcagggcttgcctctgtcctcccggggactccacagggatattcgtgcagggcaggggctctgtgccagccctgctctctcagatgccacagccactctgcagaggtgactcttggagctggaggaagtcaaaactgggccactgtttgtactgatggtgtattagcatgagcagcgtggccctggccccacactcccaaatctgccactccatagacccacttgcctcaaggctttatatttggctgctttcttacaatgagaattaagatttttaaactgaagttgaccatacaggttgcattagccctaactggcttcatgtaagaagggtgactgcctaaactagttccttgtaagctgaaccatcaattatcagttgaagccatacttttatttaaattaatatacgtagataccagaggccaagccacagagaggataatagttcttcccaataaaggtgatattaatcagactaatttcgaactaaagaagttactgcttaaagacggaatttcaggggaagcaagactcatttagaacaaatgaaatttctccagtcctacatttctgaattgacttctagcacatcaaaaatatttcagtcattatcagtctcattaactgaaatgccaaatgctaaatgcagtgttctttcacactgttttaattttcttgggaaattgagtccagtggatgttaatggagtgggttgcccatccctgaaatgtcttattttcaagtgcctggcctgggaaagaaggggaagaaacaattgcattatatccaaagatacactataaaaatagagtttttaccaaaaaaagatgtttgttctcatctcagtaggcctcatttgggcaagtgacccacaggtcttttggcgagtttgctatttgcctgttgaaatacttgtttcaacttagagaacagttatgatgtgaccatagcatggcacaactaaaaatctaagcctgaaacctgaaaaaagagatatgacaagggaaattaatcaggctatacataagtattgtatttatttgaataaaaataaaaagagcaacccat

SEQ ID NO: 16197 - DNA, 1639 bp, Homo sapiens
cctttcctttccccgtgagtgtgaagctggcagaaatcactagtaaatgcttcagtttcctgaaatggaatggaaaaaaaaaaatgttgctttctttcatcgatcatgagatagttgatttttggtttactttctatattcacaatttgtcttggcttgctaggggttccataacaaagtaccccaggctgggtgattttgacaacggaaatatattttcatatttatggaggctggaagtcccagatgaacgtattggtaggtttggctgctgcttaagcctctctgtttggcttgcggatggctgctttctggccacgtcctcacgtgggcttttttctgtgtgtatgctttcctggtgtggcttcctcctcttctagggacaccagtcattttggatagagccacagccacatggcctcgtttaaccttaataaccttcctaaaggccttatctctagatacagtcacactacacagttaggacttcaacatatgaatttctgggaaacccaatttagtctataacactccactaccaaagttcaggtccctcagacattcaaaatacattcacatgatcccaacagtcccaaaattctttacccatttcaacttcacctctagatccaaaatctcatttaaatatcatctaaatcaagtgtgaatgagactttaggtacaattcatccttaggcaaaattctccaggtgtgatcctgtgaaaccagacagatatctgcttccacaatattctacaatggtgggacaagcagaggctggacttccccattccaaaggaaagacatgagaaagaaatgaagaatgatggatcccaagcaagtctcaaacctggcaaggcaacttccattagattttaagtctcgagaataatcccctttggctcagtgctctgccttctgggccaactggattggcagccctgctttttaggctcacgggagctgcagtgtcgctcccttggcccttggcagcggctcctggcccactgaaattgaggaggagacacacttgccctctagacctgtactctctgggcccattagaacctttgagaatcacattcttcccttttcttgaagattaacgtgcgtttgcaactggatagctctattgtaccttcccgtagaatcccagaagtctaacagcctgccttcatttttgtcctgtctctttctctattcagttcaagctggcagcatttctggtgagatggttaattggttccattcagacctatactaatctctttatcacatggttgtccagccacaccctagtgttctttcaagaacatactttctcattttttgcaatgcggacaggctgagaattttccaaatctttaagtactggttcttttttgcttaacagttccttcaatttatctttctcctctaatattttactataagcagcaaggagaaaacagactccacttgcatcactttgtgtagaaatatcacctgaatattctgcactgcctcactcacaatttctgtactccacaaaacactagaacgcaatttgggcaagtcctttgcaaggattccagtttcccattacccattcctcatttctgtctgagacttaaccacaatcaccttaaaattaaaaac

SEQ ID NO: 16198 - DNA, 1507 bp, Homo sapiens
actcggcagaaagtgggattctgcatacgccatctctgagagccatggagggagccacacccctggtgacttcatggtgctggatgggagacgctagcggcatccttcagggccaagtttgataaataccaccgccatcattctgctcatcctcctcctgttttttttttttctcttacattctttttttttttcctgtttatacattagaacaagataagatttgaaatacttccttgcaaataatgtgcaactcccaaggtgaaactcaaatagaaaaagtcatctctctggtagaaaggatggctttcctgtaatgactatagagtaagagtggcagcaatctttccatgcccttttcagcagaaggcacagaacagtagcgggactgccatctctggcaagatttcaggtaaagaatctcttcttaatttctaccttcctgtttctctgaatcagcccataggtgttgatgagtggccactcttaaagagtcactcagtatcagggatctactgtctttgttcaaaggtcaaataaaaacctagtctccttttattctactttctattcttagctagaatgaaactcagcatatatacacttctggacataataatattgaatagtaattacctttactagatgaaagaaattttcattacaaacttaaatcatgtaaaactcaacaactcagattcctggacctggtgtcctggttgggtccaaggtgattttacagaagaaaaaaacaactcaagcattctggtggcaacatagagattgtaggctgcttctaagaaagttattaacaatttggaaattcctaagtaggatgagagttagtaactggatacgagtgaagtttatatccaagttcagactcaaaggcattattatgatttgcttcttcccatgtcttccatgtcctgcttctcaaagtttttctcatccatcacactcctgccttaactgctctgagtatgcatttgttttcaattcatctttatttcaatctgtttaacttttgaatcgcatgggaatacgcacattaagttcctttctaaaataaggttttatgaagctgagtttcacgataagtgtcttgctattttttgagatgttttatggacaaagaaaactttacagatttatatgtattttgctgcaccagtaaatggaccattaactagggcccacctttaacagagcacccctttgaaagttttataggtatgaaatatatgtagatatttgtaaagggttttaattttttttttttgatggggtgctgtgtaaatcttgtatttataaatgtaatgaaggtattgacagaaaaaaatatatacaacttttataaaggattgtgtactgactgaatacatttaaaagaaaatatattttgaaacctgttctgctatgaacagagataacatatctttttactatgctattggtttttaggttaagcttcctaatgcataataaatttacagtggttactttt

SEQ ID NO: 16199 - DNA, 477 bp, Homo sapiens
gaaagaccacagcaagattctttcattcgtctcctcctagcctgggggaccaggctcgaactgaccctggacatcaaaggagggattatgtggctgctaaagccatcggcccacagccctgttcacatcttggtgcttctctttcccagaggctggtcccagccaggcacacacaaaaggcagattctcgtaaacgcagcctccctccctggaggctgcctcctgccctggatctggagtggagctgctctgagattttgagttcttctgcagagatgattaaatatatccaagagacattggaaaacctgctgaacattttacattggtctgctcagcacatggctggatgcggatatttctataattccagaaagtcacacagctcctctgtatgagaccagtgggcgccatttaaaagaacaggatgagaatctaagatatattattaataaatgtaatggattttttttttgt

SEQ ID NO: 16200 - DNA, 396 bp, Homo sapiens
acttcttctctgaccttttcaataatattttaaatacagtttttcttcctcaggaaatctgaaatacaattgctgttgccttttcagagaaacttttggttttctttatcaaaaatgccttggaatttttacttttagagaataagaaatgaattattgtacctctaaactaagattttcccatgcataattacaaataatgcacacacacaaatgtatatgctgggtagtatgaactccaaggcaattttaaataggcagagagaagtttatagttttgaaaacagctgctgaagtcaggaactaaaaaaagaggttttcctaaataaacaaaaatataaaatgtgttttaattaaaagttaccaaatactccctgagatgtactctcatgtctc

SEQ ID NO: 16201 - DNA, 1366 bp, Homo sapiens
gcatataaatgaattactgcaccagtaaactgctgccatcactgtttacggcactggattccacactgattctattatcttgaacacagttgttgacatatatttttattaaattattgctttaggattttttgaagtctaaagtattgtcatggatctgtttttcttgatatttgatttgatctttcaagaatatgattgtatttatagtataaacctctgttatgaattagaaaagattctaggtttgttaataggagacctgggacatctttcttactatattacataatgatgtgacacttgccccggtgagcattgtttcccagtatgaaagatgaagagtctgtaccgaatcagcatgagtgtccttccagtttaaaaaagctttgcttcgctctcctaatggctcataggctgaatcatgtctgcccctcaaatcaggtgtataccaatgtgttttttactagcacttgggaaagttattaagtattttctttttccctgggcatcatgttctattattattttagaaaaaagtcataattggtactgaatatatggtatatataatattaaaatggtaattttgcaacagctcaaaattaaaaggttaatgttatacactttactatatgagctgtgattactaccattagccacagataccagtgcctcaactttttatgtacctattgtgatttaatgtaaataaaggtttgtatagtacttttgtagttcttaagtatgaagaaatgggtaaactttttattttgttagaaactgttatattttgagtgtaatatttatggtttatagcaaaatgaatgtgcttattgttgaatgcatgtatttagaagcctttactcagcccctgtgttctgtgctaggagcttgagctctacaggtaaggcagagctaccggtgaatgaaaggaaatcatgtcagtgaaaaatcatggtggaaagcccctggcatcacatgtgcatgctgtaggcaggacctgagctgcctccgctgcaggttcagatgcaccgctgcagctgtccttcagttagttcacagggctgcaagaggaggacacatccctccagaaaacagcctgagccgggaactggctgtgctaaagagcactgctatcaagttgaggagagagggcttccgtgtactcaggatgtagagtcattgctcagaagtgaacaaaaaatcaaaaacaaaagtcttctcaagggactgatcggccaagtatgcttttctttagagcaatgttttgccctagagaattgtaaaatttatgtcatgactcagtacatatgtgttcgtacatatatgattggaataaaatgtttatgaaatatttactcat

SEQ ID NO: 16202 - DNA, 134 bp, Homo sapiens
ttctcaaaggaaatgtagctcattagtaaaatatgtaaatacttgaattataaccataactgacatctgaatatttcagaaaaatctgaatttcaaaaataaactgcaaatgttttagatgttgttagaaggct

SEQ ID NO: 16203 - DNA, 467 bp, Homo sapiens
aagagccctgtttcccagcaccgcggagctgcactgcacacctgtggggagacttttccagctgggccaagggagtcagactctaagaacaatagatgttgcttttcccgtgtcatgtaaatttgttgcacttttttgggctgagctgttagaggggcttctccagaggctcgagagcaggccatttcccaagaagatgaagaatggtgactgtgtttttattgaaggaatttcaaatgaagaataatgtttaaaatgtgtatatagagatagtatagactcctccgcggaagcatggagggaaaggaggttgtaaaatagactccatggagactcttaggaagcagtagattcccgggggctgtgcctttagcgttagaggaaacacatagagctggaactgttaatggaaagcagtcacagctgagttttcggagaccaagaaattaaaatacaattgcacttac

SEQ ID NO: 16204 - DNA, 393 bp, Homo sapiens
ccctccgccccaccatgaataaacactttcttatacagactccttccctgtccatctacctgcctacctactttccgtccatccctccctcccttcatccctccacccctgctctgtgccgggcactgtagctttaccagcgaacaggacacagcatggtccctgcccacgtggagccctcttcccatgaggaaggcaagcatgaaaggggaattccacgtggttagcagggagggtgagtaccaggaatcagtcacttcaaataggcaccagagcttcaaaggacatcacctccaaacagcatgctgggcagggcacgtcatcttgaaaaatgaaataaaggtcatgggaaaatgatattttaatttaacagaataaacaagtatgggttat

SEQ ID NO: 16205 - DNA, 238 bp, Homo sapiens
tgactgcctctgaaaccttgacaactaattcagattttttagcaataacaaaatgtagtaggcttaaaaaaaatcttaactctgctacatggctctgactgctgtgggggattgaaaagaatatgcttatgtttgatgaaagatatttaacaagttttgttttaacagagttgacttttcaaagaaaattgtacttgaattattactataatattagaataaaaatgtttatcaatat

SEQ ID NO: 16206 - DNA, 1550 bp, Homo sapiens
tgtgtggcggtggagtccatgcctttgaactggatgtgttctattgatgacctgtgctctgcaggggaaaccagaaggcaaaatgctggcagcatgaaacccttttgtggttcagttctttatgcactaaggttttaggttgactagtggttgtagttgaaaattttataaaataccgttaatgtgaagtttttctttagtcacagaagttgaatctggttattatttaaaaactagaagcccccaaaccagcagatcttactgaagatgatgttccagcagcagcgacttagccccaggagcccagtttcaatggccttgctgtgtggtgtttcaagtgcatttaaaatgtgtgacacagaaacggcacactcttccacatgcttttgaagtattataaaacactttattacaaatttgtcttagctattagcaaataaaactgattatcattctttattaaccctccttggaattttgaaaacctcgattaaagttgccaaattgattactggatccagaacacaattttcccctcagaacagatagacagactgaagccactgaactctgccaggagtcaacatgagattccttttgctggatatgcagaaatgataggaaaaaaaccaatggtgaaatttcaagtttcaaaaaccaacctttcattaccaatcccaggcaacaaacatgtccctgagtgttctttaagaacatttgggatttatgtacaatttaatactggagttagaactttttccttattgaatgccaaccttatgatggatgtgaaaatctacggccaaatacttttgaaaacacctttctatattgcacagtgggcaaatggcttatgtgaggtaagacactagagggataaatttccagatcaacatggctatggtatttagtaatggcccagcttagagacttcagctactgatctcatcacttattagacaaattgctgctgaccttacgcctgtatattaagcctccgcaggatgccggacaatggtgaagaaactccagatatcaaggaattgggaaatcctggccaaaccaccccaagatgattacactgaaatgtagtattagtactgctgccagatctctttttaacatcatgtgcgtctcttgggatccagcaaaagtgttaagccacaatgcccttgtgccttttaatataccacagtgccagttaaactaatatttttgtttgttgcttttgggagttattttcattagtgatttcagcaaatctcatgataaaggacaaggtcaagaactccagagcactgagcagagaggctggtgatgaaaaggtgaaggcctgcgcactgaactgtaaggcagtgggcagtacagggtaactggaggcggggccagggcctcagcgctatggaagagtgtccactgaggctgcacatggcccaggagtggcaccatgttgcagggacaaccatccccatttggcttctccttaaaacacaattgcagctgcattctgcatcgctgaaaactgcaatataatattaaatctgttggtc

SEQ ID NO: 16207 - DNA, 2546 bp, Homo sapiens
gggtcattttttcctcatgtcaaggttttttttgatatcttaaaataatttgtcttattttttgatggtttgaatgcttgctttcttgtagtatcctttcacttcttaaaggaaacaaaggggaagaggacagtgaatgaacatggcattacttttaattgccctgaaaagcaaatacttcctaacggcagtaatgtgactatgaccatgatatattatatatgtgacagatacaaattctctgtgatcagtttgttattttttttctccttaaggcacaaaataattggtttgaggtatgtgaaacactagaggtcaaccttacatagtatatagaactgatgggtttacccagctacccagtagcataacttttcacagctcggggatgaattaacatggctgaaataaaactaaaagtatggtttttaaactttggcatttcatgatttatcatctcactctactctaaaactggtggtttcttactgaaggtgttctccatttgaaattttatcttcaaagtatttttaagtagtatctttaagacatgacttgttagtaataaaagtgttactagttggaagagtagctctcaaatttgtcttaatgtaaatcacctgggaatctttcaagttattttgaaatttaaaccaccgtctgggggtggaacgcagacatcctcagtaatccttaaagtttccccaggtgattccaggtttggtcaccattatcttagagcatctactcacttcctctagccttggggttatttgtccaaggtcttgtagtgagttacagaatactaaagtggatgtagaagtggtcagattgactgaaactataccctgaattagatgtgagtttagattttgtttatatggaacctgatccaaaaaactacgaagtcctgagcttgtttcctgtatagtactgatgctgaaataagatgacagcagtttgtaaaataatacacaaatatgaggaattgtctgacattccaaatttcgaggatttttagacttttttcattaaaccttagaaaaaaattaccagtaatcctacaactactggtagtgttgttgtgcatttgcacaaaataggtataattttttcttattacatcccaagtttatgatgcattaagcgttttgcatattttgatatatttttgctttggtttaccatacattttagtggctacagaatgtagtctgcttaataaatgggaattcctagaatgtttaaataccatactatttaagacaaaatacaaaatatccagaaaaatccaggttgcgtggctggttagtaaaggactaaaacccaggttcttggctaaatgttttcgtttatactgtttatctttcccattgcttaagcacagcacaaactatgtaattatatataattacagttgacccttgaacaacatgggtttgaactgtgtgagtctccttacacacaggttttcttccacccctgagatggcaagaccagccccttgtcttcctcagcctgctcaacgtgaagatgatgaggatgaagacctttatgatgatccacttctacttattaaatagtaaatatatttttttcttatgattttattttcttttctctagcttcataagaatatagcatatgggctgggcgcagtggctcacgcctgtaatcccagcactttgggaggctgaggcgggcggatcacaaggtcaggagattgagaccatcctggctaacacagtgaaaccctgtctctactaaaaacacaaaaacttagccaggcgtggtggtacatggctgtagtcccagctacttgggaggctgagacaggagaatcgcttgaacctgggaggtggaggtttcagtgagccaagattgtgccactgcactccagcctgggtgatggagcgaggctctgtctcaaaaaagaaaaaaaatatatagcatataacatacaaaatgagtttatcaactgtttgttattggtaagtcagcagtgggctattggtggttaagttttgggggagtcaaaagttacatgcaaattttttactgtgcggggtgtcagcatccctaaccccatgttgttcaagggtcaactgtagtttaaaatgactcctgtctcaaaaaaccaaaggataacctttaagggattggtaactttgactcaaaactgctttgtaatcttttcacaatgtactgaaaagtgtggctagttatgtttgatccacattctagagaaatttgtaggttttaatttcttttctcttggtcctctcttcatgtataatggttgcttttaacagctgttcgctgatgtggtcctgctctgtcccagtctagcagctttagtgtatggaaaaattgaactaggaattgagttttgaagaaataaaggtgtaagagcaaacattcaacagttgctgtccccagtaatgaagttcatacagacaaaagatggcatgtcactgtacatcataccttgcaataaatattctgttaaattgtgctggtgcaatttaacatgcttttgtcaaagt

SEQ ID NO: 16208 - DNA, 1668 bp, Homo sapiens
gccagcgtagggacgaaaactcatagacacatcggctgttcacacgttccccgcaatctgagaacgaacaggaatggagagaggactcaactgggacccacgtggaaaagaccgagcaggccacagaggctcggtctccccgcgcacagcgtaggcacccggtgtactctgtaaacgggaggaggtggggcgaggcagccagagcccttggactggcacagggaccctcgatggagcgaagccctcaaacgggatgctttctggtattctatcggggagggtccttggcggtaaccagagggcagcgtagtgtcaacaccagagaccaggatccaaattgtggggaatcagtttcagccttccatgtgctgccggaactcgggcctttttacgcggttcgtcctctagtgcctttaactgcgttactacaataaaaggctgcggcagcgcctttcttcttaaagtgaggaggacaaatttgcaaaagaaataggcttttcttcttttttaaattggagaaatctctgctctggttgacctgggctggttttccctgtctctgagaacttgagacctagctccgagttgaactgtgcgtcagcactccagtcccatcacctgaaccttcagtctcccccatctgttacactagagggctgcaggactctatccaccgcccccgggttatcattcagggccccatcatcttggatgctgccctgcgtatttggcagcaatggtgggccacccagggcctctgagtagccacccaaagcctagccgctgttctagggaacggaaaagagttcatggccaagcgtctaacctaaagtcccaggattggctccaggcagcaattatatcataacttattgaacttttgagcaggacgtgctggtaatttcatggctgttactgcccagtcataaatctgcttttccattataaggcagagagaagtacattcgttcatttgtccactgtttcttgtcatcacgcagccctggacccaaagggtgaactaaagtttaaggagatgagaggattcaaggagcccgttggtgacgcctttcagtagctggggagggctcttccatccccagcaccccctgctacacctcagcagcctcccccatgcaaaaaggaaagagaaaaattaagttagggcagtcagtaaagtgagctttagaaagaaactggaattttaacttcattttgtatcttgcttaagtagcaggctcactaaaattagagaaagtccaataactctccccctttcccttgagaaatctttaagtttcgattctggagcaaaaactttcagcattaaatatttcagaggctccattcacagctttcagataaactggagtgttcagatggactgttttaataaaaatctttgagcaagtgagttatggcaagagaaactcagcctctttctgtataaacttaacagggaagggctggggtgtgaaaaagaagattgtatgaaaaccattggtaatttttattttttatttttgggactgcactatcctgttcacgaagacatgtgaacttggttcagtccaaatggggatttgtataaaccagtgctctccattagaaatatggtgcaagccacatatgtaattttaaatattctagtagccacattaataaagt

SEQ ID NO: 16209 - DNA, 509 bp, Homo sapiens
gaccccagatgacctgcagaaacagaactgttcagtattggttggactgctcatggattttgtagctgtttaaaaaaaaaaaaaaggtagctgtgatacaaaccccaggacacccacccacccaaagagccaaagaatagttcctgtgacattccgccttccttccatgtagtccctcttggtaatctaccaccaagcttgtggacttcaccccaacaaaattgtaagcgttgttaggtttttgtgtaagattcttgctgtagcgtggatagctgtgattggtgagtcaaccgtctgtggctaccagttacactgagattgtaacagcatttttactttctgtacaacaaaaaagctttgtaaataaaatcttaacattttgggtctgttttttcatgctttgctttttaattattattattattttttttacattaggacattttatgtgacaactgccaaaaaagtatttttaagaatttaagcgaaataaacagttactctttggt

SEQ ID NO: 16210 - DNA, 20 bp, Homo sapiens
aaataaagtgccattctctg

SEQ ID NO: 16211 - DNA, 984 bp, Homo sapiens
agcctcgtgtatcaaggagcccatcgaaggagactgtggagccaggactctgcccaacaaagacttagctaagcagtgaccagaacccaccaaaaactaggctgcattgctttgaagaggcaatcattttgccatttgtgaaagttgtgttggatttagtaaaaatgtgaataagctttgtacttattttgagaactttttaaatgttccaaaataccctattttcaaagggtaatcgtaagatgttaacccttggtatttagaaaattaaaaccttataatatttttctatcaagatgtatattttacagtcgtgccttttactctcattagcaaaaaagataaagattttattttggtatttacaagaattcccaggtacgaagatatctgcatgggtggaaatcaggttcaagcaacgtactttgcattaactgataatacctcagctgcggggttaaagttttcccagtatagagagactgtcactaggaacattgtattgatttattcaggtcattgagatcttctagatgtattttaaaaagaatgctttttggttatgtgttgctaccacagttaacactccataatgttcatgtcagccaaagaggactaaccaaagctgaaatctcagagaacaatttgctttactaagctgagtcaacttgagagcgaacttctaacaatgccgcactgtagtgtggctggttctaccactatgactttaaaacatgtttatatcatttttaatttttatgatacggtagtgtcagggagaaatgtaatgttctatatgaaattcctttttcaagtttgttcattaataacagttattaatttaaatcagcgttagagtttgtgctgctgcaactgctgtgaaaatttctctgagtaattctgatttgtgaatgatcccagaccaaccctgagattttgtcaacctgattaagtcaatatgaatgattaaaaagatgtgagaac

SEQ ID NO: 16212 - DNA, 900 bp, Homo sapiens
tggccttctgatgattcttaaagagttttcaattttttcttatgtgaagagttgacactgaaatctaaaatgtttaattgttgtaaatattacagttttttttttttactacatattctttacaacagcaaccaaagaaaacatacctcaatacactcaaaactgaagacatagaggactcagatcaaagacaaaatctgatccatatattggtgctagattctgcaggaaaccccagcagtgtgaacgcatcccaacataggttaagagcaagttgaaaacaaaggccatggcattctgccactgcatccttcagacagttatatcctccttttaaaccattgttgttgagtgtaagatgtccttcatgttttcttataaagtcagtgtttagaaatgttaccctttctaagttatatacagatcaaatgcttttttctttcacgtacatccatcatttgcaactgctgttcgtacacagaaacaggactgctcaaatgatcctatttgtattttctgatgctatcagactctaatgtttttttccctaaaatattattgccatcatgctttaggaattttatatttttacacaatcatattttagtatggtgtctgtttatgtaactctgacttgctggaaaagttgaaactccaaataatctgaaactagaaaagaaatagcacataattactaccttccccttggcggctctcctccccaacccccaccccacaattttatgacttccatttggcaattgttgaattataactgcgactgaaacaaacaggttcatagagatgaattttctgagaaacatatatctacatgttgtataattggattttttttccatgtaagtgaacataaaaacatcttttccgggtgctttcttc

SEQ ID NO: 16213 - DNA, 4884 bp, Homo sapiens
ttctacagctttgcctgaactctccttttttcttcagatctgctcctgggttttaatttgggaggtcaattgttctacctcactgagagggaacagaaggatattgcttccttttgcagcagtgtaataaagtcaattaaaaacttcccaggatttctttggacccaggaaacagccatgtgggtcctttctgtgcactatgaacgcttctttcccaggacagaaaatgtgtagtctacctttattttttattaacaaaacttgttttttaaaaagatgattgctggtcttaactttaggtaactctgctgtgctggagatcatctttaagggcaaaggagttggattgctgaattacaatgaaacatgtcttattactaaagaaagtgatttactcctggttagtacattctcagaggattctgaaccactagagtttccttgattcagactttgaatgtactgttctatagtttttcaggatcttaaaactaacacttataaaactcttatcttgagtctaaaaatgacctcatatagtagtgaggaacataattcatgcaattgtattttgtatactattattgttctttcacttattcagaacattacatgccttcaaaatgggattgtactataccagtaagtgccacttctgtgtctttctaatggaaatgagtagaattgctgaaagtctctatgttaaaacctatagtgtttgaattcaaaaagcttatttatctgggtaacccaaactttttctgttttgtttttggaagggtttttgtggtatgtcatttggtattctattctgaaaatgcctttctcctaccaaaatgtgcttaagccactaaagaaatgaagtggcattaattagtaaattattagcatggtcatgtttgaatattctcacatcaagcttttgcattttaattgtgttgtctaagtatacttttaaaaaatcaagtggcactctagatgcttatagtactttaatatttgtagcatacagactaatttttctaaaagggaaagtctgtctagctgcttgtgaaaagttatgtggtattctgtaagccatttttttctttatctgttcaaagacttattttttaagacatgaattacatttaaaattagaatatggttaatattaaataataggcctttttctaggaaggcgaaggtagttaataatttgaatagataacagatgtgcaagaaagtcacatttgttatgtatgtaggagtaaacgttcggtggatcctctgtctttgtaactgaggttagagctagtgtggttttgaggtctcactacactttgaggaaggcagcttttaattcagtgtttccttatgtgtgcgtacattgcaactgcttacatgtaatttatgtaatgcattcagtgcacccttgttacttgggagaggtggtagctaaagaacattctgagtataggtttttctccatttacagatgtctttggtcaaatattgaaagcaaacttgtcatggtcttcttacattaagttgaaactagcttataataactggtttttacttccaatgctatgaagtctctgcagggcttttacagttttcgaagtccttttatcactgtgatcttattctgaggggagaaaaaactatcatagctctgaggcaagacttcgactttatagtgctatcagttccccgatacagggtcagagtaacccatacagtattttggtcaggaagagaaagtggccatttacactgaatgagttgcattctgataatgtcttatctcttatacgtagaataaatttgaaagactatttgatcttaaaaccaaagtaattttagaatgagtgacatattacataggaatttagtgtcaatttcatgtgtttaaaaacatcatgggaaaaatgcttagaggttactattttgactacaaagttgagtttttttctgtagttaccataatttcattgaagcaaatgaatgagtttgagaggtttgtttttatagttgtgttgtattacttgtttaataataatctctaattctgtgatcaggtactttttttgtgggggttttttttttgtttttttttttttgttgttgtttttgggccatttctaagcctaccagatctgctttatgaaatccaggggaccaatgcattttatcactaaaactatttttatataattttaagaatataccaaaagttgtctgatttaaagttgtaatacatgatttctcactttcatgtaaggttatccacttttgctgaagatattttttattgaatcaaagattgagttacaattatacttttcttacctaagtggataaaatgtacttttgatgaatcagggaatttttttaaagttggagtttagttctaaattgactttacgtattactgcagttaattccttttttggctagggatggtttgataaaccacaattggctgatattgaaaatgaaagaaacttaaaaggtgggatggatcatgattactgtcgataactgcagataaatttgattagagtaataattttgtcatttaaaaacacagttgtttatactgcccatcctaggatgctcaccttccaagattcaacgtggctaaaacatcttctggtaaattgtgcgtccatattcattttgtcagtagccaggagaaatggggatgggggaaatacgacttagtgaggcatagacatccctggtccatcctttctgtctccagctgtttcttggaacctgctctcctgcttgctggtccctgacgcagagaccgttgcctcccccacagccgtttgactgaaggctgctctggagacctagagtaaaacggctgatggaagttgtgggacccacttccatttccttcagtcattagaggtggaagggaggggtctccaagtttggagattgagcagatgaggcttgggatgcccctgctttgacttcagccatggatgaggagtgggatggcagcaaggtggctcctgtggcagtggagttgtgccagaaacagtggccagttgtatcgcctataagacagggtaaggtctgaagagctgagcctgtaattctgctgtaataatgatagtgctcaagaagtgccttgagttggtgtacagtgccatggccatcaagaatcccagatttcaggttttattacaaaatgtaagtggtcacttggcgattttgtagtacatgcatgagttaccttttttctctatgtctgagaactgtcagattaaaacaagatggcaaagagatcgttagagtgcacaacaaaatcactatcccattagacacatcatcaaaagcttatttttattcttgcactggaagaatcgtaagtcaactgtttcttgaccatggcagtgttctggctccaaatggtagtgattccaaataatggttctgttaacactttggcagaaaatgccagctcagatattttgagatactaaggattatctttggacatgtactgcagcttcttgtctctgttttggattactggaatacccatgggccctctcaagagtgctggacttctaggacattaagatgattgtcagtacattaaacttttcaatcccattatgcaatcttgtttgtaaatgtaaacttctaaaaatatggttaataacattcaacctgtttattacaacttaaaaggaacttcagtgaatttgtttttattttttaacaagatttgtgaactgaatatcatgaaccatgttttgatacccctttttcacgttgtgccaacggaatagggtgtttgatatttcttcatatgttaaggagatgcttcaaaatgtcaattgctttaaacttaaattacctctcaagagaccaaggtacatttacctcattgtgtatataatgtttaatatttgtcagagcattctccaggtttgcagttttatttctataaagtatgggtattatgttgctcagttactcaaatggtactgtattgtttatatttgtaccccaaataacatcgtctgtactttctgttttctgtattgtatttgtgcaggattctttaggctttatcagtgtaatctctgccttttaagatatgtacagaaaatgtccatataaatttccattgaagtcgaatgatactgagaagcctgtaaagaggagaaaaaaacataagctgtgtttccccataagtttttttaaattgtatattgtatttgtagtaatattccaaaagaatgtaaataggaaatagaagagtgatgcttatgttaagtcctaacactacagtagaagaatggaagcagtgcaaataaattacatttttcccaagtgccagtggcatattttaaaataaagtgtatacgttggaatgagtcatgccatatgtagttgctgtagatggcaactagaacctttgagttacaagagtctttagaagttttctaaccctgcctagtgcaagttacaatattatagcgtgttcggggagtgccctcctgtctgcaggtgtgtctctgtgcctgggggcttttctccacatgcttaggggtgtgggtcttccattggggcatgatggacctgtctacaggtgatctctgttgcctttgggtcagcacatttgttagtctcctgggggtgaaaacttggcttacaagagaactggaaaaatgatgagatgtggtccccaaacccttgattgactctggggaggggctttgtgaataggattgctctcacattaaagatagttacttcaatttgaaggctggatttagggatttttttttttccttataacaaagacatcaccaggatatgaagcttttgttgaaagttggaaaaaaagtgaaattaaagacattcccagac

SEQ ID NO: 16214 - DNA, 194 bp, Homo sapiens
attcagttacatccatctgtcatctgaagaaggaggaaaaaacccaacatttcttggaccaaaagtatagtgactatctgttcatgagagaaattttctgtaagcttgctgttttacaggggatttatcaataattgattttgaggaatcagtttttttctatggctaataaactttttaattcacttatactg

SEQ ID NO: 16215 - DNA, 3025 bp, Homo sapiens
tcaggagcagtggagcagtgagctgcctcctctcctagcacctgcttgctacgcagcaaagggataggtttggaaacctatcatttcctgtccttccttaagaggaaaagcagctcctgtagaaagcaaagactttcttttttttctggctcttttccttacaacctaaagccagaaaacttgcagagtattgtgttggggttgtgttttatatttaggcattgggggatggggtgggagggggttatagttcatgagggttttctaagaaattgctaacaaagcacttttggacaatgctatcccagcaggaaaaaaaaggataatataactgttttaaaactctttctggggaatccaattatagttgctttgtatttaaaaacaagaacagccaagggttgttcgccagggtaggatgtgtcttaaagattggtcccttgaaaatatgcttcctgtatcaaaggtacgtatgtggtgcaaacaaggcagaaacttccttttaatttccttcttcctttattttaacaaatggtgaaagatggaggattacctacaaatcagacatggcaaaacaataatggctgtttgcttccataaacaagtgcaattttttaaagtgctgtcttactaagtcttgtttattaactctcctttattctatatggaaataaaaaggaggcagtcatgttagcaaatgacacgttaatatccctagcagaggctgtgttcaccttccctgtcgatcccttctgaggtatggcccatccaagacttttaggccattcttgatggaaccagatccctgccctgactgtccagctatcctgaaagtggatcagattataaactggattacatgtaactgttttggttgtgttctatcaaccccaccagagttccctaaacttgcttcagttatagtaactgactggtatattcattcagaagcgccataagtcagttgagtatttgatccctagataagaacatgcaaatcagcaggaactggtcatacagggtaagcaccagggacaataaggatttttatagatataatttaatttttgttattggttaaggagacaattttggagagcaagcaaatctttttaaaaaatagtatgaatgtgaatactagaaaagatttaaaaaatagtatgagtgtgagtactaggaaggattagtgggctgcgtttcaacattccgtgttcgtactcccttttgtatgtttctactgttaatgccatattactatgagataatttgttgcatagtgtccttatttgtataaacatttgtatgcacgttatattgtaatagctttgcctgtatttattgcaagaccaccagctcctggaagctgagttacagagtaattaaatggggtgttcacagtgacttggatacaccaattagaaattaaataagcaaatatatatatatatataaatatagcaggttacatatatatatttataatgtgtctttttattaaccatttgtacaataaatgtcacttcccatgccgttattttatggttcatttgcagtgacttttaaggcagtactgtttagcactttgatattaaaattttgcttatgttttgctaaattcgaataatgtttgaagatttttaggtctaaaagtctttatattatatactctgtatcaagtcaaaatatctttggccattttgctaagaaacaaactttgaatgtcaaactgatgtcacagtagtttttgttagctttaaatcatttttgctttagtctttttaaaggaaaataacaaaactatgctgtttatattgtcattaaattatacaatcaaacaaatgccaaatgaattgcctaattgctgcaaagtataacccagataggaaatcatatgtttttttccaagagtcattctaatatttgattatgttatgtgtgcttttatgaaagattgttatttttatatatcaagatgatagaacctggaatgttaggattttgaaatgttagacttggaaggggcctggtctgtcaactagtccaaccccttaaaattcatagaggagcaaactggggcccattgaagggtgaagagttactcaaggtcaaacagctggtaacagaatcaagactaagacctaatttacctttccatactctttttttttctcaacttcatctatataaaatcaggcttttaaacataaccactaatatttacctgaagataaccatgagtaaagtatacttttgcattaattttttgagcttatatgcaaacataataaatattattaaatatcaggaaagctaacatttcatacaagatagcttcagaccaaattcaaattgaatttgaataaattagaaatactgtgcatacataaccttcttgtgcaccatgagtatttggaaagttaatccttgtttttgtcgtgtctataaaggaagaacaaaacaaaataaaaacagagccctagagaaatgctgttactttttatttttacacccatcagatttaaggaaaagactttttagccattataatctagtggttggaaggaatgaagaagcttttttagtaataggtccagatatgagtgctaaaaataaagatgatagcatgttcttctgtcttccatagttattacaactatgagagcctcccaagtcatcttatcaactcaactcccttttttttgtcttaatgttgcacataagtttatacagagtggatgaccacactagcacagaagagaacaacatgtattaaagcaggtgattcctccccttggcgggagagctctctcagtgtgaacatgccttctgtgggcggaaatcaggaagccaccagctgttaatggagagtgccttgcttttatttcagacagcagagttttccaaagtttctctgctcctctaacagcattgctctttagtgtgtgttaacctgtggtttgaaagaaatgctcttgtacattaacaatgtaaatttaaatgattaaattacattttatcaatggct

SEQ ID NO: 16216 - DNA, 526 bp, Homo sapiens
atgattttgtgtctggcaccatgttagacagttttcatactttttctatatttctcgcttcatttagcaattcagtgcatccattgcagcaaataatttttgccttattgaatctctaaatgccttaacaagtgaccctgacagtgctgcacctgtcatacacattgttgcaggattcctggtggttgtgccaatgaaaatctgcacagacaaactacaatttgtagatttatctcgtgatctagacaaagtgactactgttttttttcatattgtgttcaaaccatctgggtgagcctcaagttattactaagcagtttatccaattgcatcagcattgattgacctgctgcttattcagagggattagaccattggtggagagaagcgagctctggctgtgacatcagttgtcaggagaactgggatggaacgccacctctgctacttcctgcctgtgtcacctggttcctgcttttggctctctcctgcctacagtggaaatggctacaatatttaacctcag

SEQ ID NO: 16217 - DNA, 1666 bp, Homo sapiens
aaaccaaatttcagtattattggtgccaacatgtctatcctgaggacctttgctgctgttggacactccgtcaccttttggaacacaagtatatcaagatagtggctactgatgttcaagtgggattgaagtgtgataaatggatatattttgttgtttgctggggtgttcatggagatgttaagagattgaggccctgggctgagggtatataatgtatgtcaggtaaagtttgaagactgccaaggagcagattttctccctggaaatgtgaaaactgaacctataactctgataaggacttgagatgtgtagaaacgttgggttatggaagactagtttcttccataaccctgaattggagaccttaatgctaagtgtagattattgaggtttgttagtgaggaaaagaataagagttcagaagcctttgttatcagatagcgaaatcagggcctagtgaggagcacaggtcgactacataatggagtccattggcgaaccctattgcaatttggtccaactatatcttctggtgaaggaaattaatgatgtaagaaaatgcaagaggctcaacttctcttccaaaaatcttctggcttctgaactcttcctctgcctctctttaaataaataacacagaatttcaagtggtaggagacttattaagccagtcaccaagcttggtctgtcagcctgtcttctaacacctcaaagatcttgtgccctgtgctgtccctcccttgtaattatgaaaagttctttggtttctggggtgaattctacccatgtataatgaggaattctctcataaccttttttgtcttgtctgtcatctctgttcatcccttcctataacctctaggtaaaaagaaaagaaaaaaagaaatttcgagatattttcaacattgttagagtttgggctaaaatgagcaaggagaaaaaaaccaccaagaacatttcctggggcatgttccagttttgaggggtgatatatctgccagatagggggtatctgacccagtcttcttttcagctggtctctggggggagctgagaactcgcttgctacctcacatccttttccccagactttttatctcctatgcatccctttgctttctatagctggtgtttcttccccaaaatggcgttcccatgcttacctttctcacattctagacaatgatggacaaagacgcatgcaagactcagacccggggaatggtgtggtgctaatctcaacacctgacattcacagcaagcatggcccagcccaactgcatgtctatctcaaaccgcagaaaggctttaatactggaaaaaaagaattcaagactacaggcagctcccctctgtaccccaactcatttaaaataggaggaatcactttttgccttacttaacgcttttttctgagcacagggatgggcacctgcaccccagaaggtgtgagctgtctctctgccaggagctaaggttcattaggggattggatggtttatcacttctttctttctgagtttacttttagtaacttttattgatggctacctttcatgtccctgtctaaagagactttctctttcatacgtcttaaatctcatcaatgaaatccagtgaaacagcaccatttcttagtatcattaaataactagaaagtatc

SEQ ID NO: 16218 - DNA, 470 bp, Homo sapiens
ctgcctatggaggaagactgtgttcgggggagctggcatagctagtgcagagttcagattttctgctgataatcttttacaccttgggaaaactttaatatccgtacctgaaggctgattcacctaaaaatgtgttaactgaaagaaaatgtcagaatgtttcctttctgctcttacacagcattgttttgtcaatcaacacagcctgcactgaaaggacctgcatagactatgtctgtgcaaagtgcctgagtgtctgctttcacctcagtctgtacagttggaaatgagaattcataattaacagcaaaatctaaggaaaactacggctgctgggttgggatttctgccagctagctggtactggcttcttgtttcaagagatgaacctaaatgagataggaagcctgtcccatagcagccttcctctcactactttcctggcatctaatgcaacaaacttatcacac

SEQ ID NO: 16219 - DNA, 263 bp, Homo sapiens
gactttgggggtggctctcttgtaattaatctgtgttggcaaagaatgtctggaacatggacttggcggtcagtaacctgtaacagagctacaactaggaaaattagagtggtagtagtcacttatttaagaattcattcaggtaaacagctgcaccctctgtaccccttaagtggcaaagaagctgttatagtcttctgaaaattatcactatgagtgctataattctgaatataatgtctcttaattagaattcatacaag

SEQ ID NO: 16220 - DNA, 1032 bp, Homo sapiens
actgatgacttttatatgtacactgaccatgtgatgtacatttattatgtctttttttaaagaatggaaatatttatttcagaggccttatttttggacatttttagtgtagtactgttggctcgtatttagaatattcagctacgacagttttggactgtttagtagtctttgttttatgtttttaaatacagaaattgctttcacaaatttgtaccacatggtaattctaagacttgttctttacccatggaatgtaatatttttgcaaagatggactacttcacaaatggttataaagtcatatccacttcttccacaatgaccacagcaaatgaccaagcatgaactaaaggtaaagatgtttacagattacttttcttacaaaaaaaatctagaagacactgtgtttaaatagatatttaaatgtttttgagatttagtaactgattttttagacactgcctatcgcatgaactgtaaagctgtgtgtattaggtgtaaaatatttataagatatatggactggggaatttgattattcctccctttgaaaaaatagtcctaataatttgaacaaatatgttagtaatgatggaacagatcaatgaaaagtagatatagatattgtgaaaataggctgtttaacaaacagattggaataaagcctattctaccagttaaactactttaatacacattcatttttaaagaaaatgtttgttttaacataaataaacaaatcgtatcagtgtttgtgaataaaatacaaaaatgattgttaatgattggtgctcttaaagtgagcttaaaatttatccaagacgtatatccaaatttgtcctgtagtaatagattaatattcatagattgttggtgtttaaagatctgaagtgtgagtagaatgtattcagctgtttaacatgtagtttagatattcaaaagtatgcatgtagaatttaaagaatatgttaaaaattattaattttaatattttgtttggaaaagcatgttataatataatgttttcac

SEQ ID NO: 16221 - DNA, 1438 bp, Homo sapiens
agaggaattaagtatatcctaaatatgaatctcctaatcatgcagttttagtttgaatagtgtagtcgtctacatttctgtgccatgtaggaaaacataaatgtattttttttcttatatttaaaatcttgaagataatataaatattattatcactctttctcatggcagctgtggattttttagttcctttctcttgtccaccagaaaaatagtttcctaggttgggccagttacgtgtttggtaagggcaactttgcggccgtcatttgcaggagaactctaaatattggttaggattaatattgtggccagcctcaaaggggaataactcatgtgtgggttatatcgtccagatgttcagatcaacagatttgttagtaaattagcagtcacaccccttttttgatgctttcacattaaaaaattgaagttttggacttgagcatttggctctagtatcatagctttacttataagaaaaccctgggcaagtcatctgcttattctcatcagtaaaaatggagagggttggcctctgctgcctgcctcagaggactgttgtgatgatcaaaggaaatggtacacattctgggggaacaagaagcacacccagagaaaacaagcctcatcagttcctccaaaacagaatggaaagagttacaccttctgaaaaagccctcagcaccaatcaataaggtcctaggttggagagaaactaaagctggtcttcagaagccttttcacagaatcaagagtgaaaaataagtaaatgtttgggtgaccactttttcatcagactaactatatcttgggttttagttgggtctcaaaatgttccccagccagaccctttctaatttccttttgattaagatctttggtggactatagcactaaatttgtttaagcagtatgaggcataaaattgtgactatgtttctaaagtcggccctgatgcattgggtttggaaatgaccacaaatattcctgttttcctgagtgtacccttcagggtccagctgtccaaaacagtgttgataggagttcatcatagctgctttgggaggaagccagattctccttatcttttagctttagatcgtggaatccaggaagtagaacaatgtctattgttgctaaagaaagaaagaaatgggccgggtgtggtggctcacggggagtaatcccagcactttgcgaggccgaggtgggtgaatcacctgaggtcagaagttcacgaccagcctgaccaacatggcgaaaccctgactctactgaaaatacaaaaattagctgggcatggtggcatgcgcctgtcccagctactcaggaggctgagacaggagaattgcctgaacccaggaggcggaggttgcagtgagccgagattgtgccactgcactcaagcctgggcaaaagagccagactctgtttc

SEQ ID NO: 16222 - DNA, 1077 bp, Homo sapiens
gacgactgatgtgtcacaagctgttttttaaaatcatcttccaattctatacttcaaaacacacagttgctcaatgtcaaactgtgatgacaaatattacgtttatctagttagaagctaatgttttgtacattttttgtatgaggaagtgatgtagcttgccctgattttttttttttttttttggtcagctttaatatatttatgccagaattttaaaaccaacaaaattttcttgttcaagcgtgcattgaagaaccacatttattcaatggttgacgttgttttgtgatatttgtacacaaattttcttttctcagttttataaacacagaatataacaattcactttaaacttttattaccacagttgctgcctcctccagaatttttgaattttaataaaaggcaaacttttgagctgcaggaaggacaatgttggttaataataaatctcaaagtcaattgtagaaaaaaaattgtcttcaaaaagaatgttgcactctgatctcttaacaaattgttacgttcaaagtttaaagtgatatattaacaaagtcacctagttatacaaacaattgtcagagaattctggatttggagggtattggggttatatgattctttcttagataatggcctctactaaataactcaagatctttctggaatgtcttctggcaggcaggtgccactgtcagcttttctccaaaaagcagccaacatcagcctcccctgtcaactcaacagttttgtatctcatattatatggactttatatgaaaatgaatattttacagtttgcacagtattattttacagaaaaggaatcagagaatctacaacatagggccccagaacaacagtttcactttgtggcttttaattattctagaattttaactgcatctcatttttctagcatggtgagaactaatatgtaactcctttgattgaaggagctcttttgtccgtacctatcagaatgttttcttgacacttccatgttggctcttctcagctttttttgtacatattttttttttctaaagagaagaaaaagttatcacaaaatgt

SEQ ID NO: 16223 - DNA, 1011 bp, Homo sapiens
atgtagagcaatacataagctcaatttgatttgagactagtacccaagtgcagttttagtatggctcaacatgggtcagatttagtgataaagcaaattctccttggcctcaggcaaatagtttctaaagattctgtgaatagtggacaactgcccatgagcatttgacttcccttactctttgatgatcgtagagaaagacttggtaatttatctaagtatctttaataaatctttcagcagagagattaaacctaggttcagagcatgggtgctctgagggacaaagttggattagtataagggagctggagcagctgatagtggaaaacagaataatgattcaaagagtcttctgtcaccatgtcatattgtggttctttcagttccatgatatgtttggctctgcatgccaaagtccagtgattaagcatatataagttgtcaaggaaacaaagcccaaatgtttttaaaacaagtatacagtttttgtcattgtttaagaaagccagttgtttggcatgtgagttaaaggcagttccaatgcctgatggttcccagatctatgaaatgagtggaccattaaccttacatgtaaagattatgttagtaattaagaaacctaacaaaggtgttaccaaggaacctttgggagtgccttttttgtttttcaagatggacccaaaaaagtggaggaagatattgttcttttgtgccctcctacctgtgagagatatttgtagtcctatgtgaatgagcttatccctccacaaccaggtgcatatgaaagtgtacatattatgactgccaagtattggaaatgaaaagacctggagtctatgctaggaagctgagatattttggtattgcattggtttttatggtaactaggttttgcatgcaattaaaaatccttatttcttgttctagggcttcccttagttaatggttattataaacctattaattcatctgttttaaccattaaaacctgttttgtttttagctttg

SEQ ID NO: 16224 - DNA, 921 bp, Homo sapiens
tctaagtcaagagaagaagaggagctggctagtcaggaacttattcattaaccaccaaacctctacctcttctctccttgactgtcacctgtaggacagtttatcagtcaactacctttcctccagactttacttccaggctctcctcttcagtagctggatgactttagcagaaaggactggtaaatacaagccttgggtttcagaatgaattagaaacaaataactcttactgtcttccctcccagctttgtttattttgtgcttttagacttttcagtgttttctttttccagcccactgtataaacttggattgtccattcctcctgaagaaatcaagttggtatttttgatgtggaaaagggaacaaaagtggaaacatggctacttttggggagtgatattttaaaaaataagttgtctatgggcacaaagttttcttcatttgtgtagcaaacttcttgtgaatgtggattacaaaatggtataattgtgctactctcccctgggtggtttgcagccctaatgaaattatgtctaggatgattcagtctatttcccatttactagcagagtaacttgttaagatcagctggctttcttgttaaagttatttaagttttgaatgctctactacttcaagtctttaaatttcttgagactagaataattttaaataatatgaccctttgtcttctaatgaaataaagattgaagaggttgagtcaggactgagctggtgaagaaatcttgtgggtattctggaaatttgatacggagagaacttggtgagctatgaattactctcagtctcctttttacagggttgttgtgatccctcttttccagaaaattctgtggaatgtttctgtaggactttgttctccacaagcttgaattaaagcaggattcagtttgc

SEQ ID NO: 16225 - DNA, 163 bp, Homo sapiens
gactaccgtgaggatggattggacattacaccacactggaaaagtgaaacatctcattcagttggtgatcttcctgtcatgaaagttgcttgacagctctaattacgaattgaacacattaaacacctggtgaaattatcaattaaaaacatctagtcaccat

SEQ ID NO: 16226 - DNA, 2097 bp, Homo sapiens
actacaaagttatttcttcatcttgacctgtttttttaaatgtaaacttttaaggacttgagataactaatttgtttatatacaaaaattaatgttactgtgttacttaacccatgttttctctttatataatcacttatcgcttacaaatgagcatatattcctcatctcttaactagtctaattatggtccaattattgtggttgtgattttatgcatatcatcaaatgtttttttcttatgcgggtcttttatatattagggatcctgagatacccgattctatatgtaaaagctaatatacaaaaaagcagattaaattacatgataaatgtagctgatcatcagtgtttaattgatttaattcctaaggcaatattaatgtgttttctaaagtcattcaggtaaggaagaattataaatcaggtaactggaccaacaaagggaacacatataaagctattatgcatgcatggagccgtttgaggctagttttttaaggccacaactccagacccctgatttagactgagataggaaacagatcttgaaagaatccttattttaatgatacatgaatatcatgttcctatacgcttaataattggtctctacgttttaatgatacatgaatatcatgttcctatacgcttaataattggtctctacgactttaatgtttttgtttttttaagctgtgtaagtatttttaaatcaaagcttaggaggtgtgttgcgtggtactatctgctgcaaatttatctgaagtttgttaatattttccaagatttttgtcagccttttcataatccagtcattaacaacctattggtaaacaagaatgtaggtgccagtagactaaaccaaatttatttttccctgagtctgatatatatatgtataaatataaataactcaatccatctgttccaccaaaataactcaaaagttggatgattatttgtcttccgctttccagttcaaagggatgaaattcctttagaacttgaaagatgacactagcgaacaccatgagaatactgtctacagtttttggtacgtcatcactagaacagtgaccccaaactgaatcatgaaaggtctgacatgatgtaatctgatcttccatgtgttattttggccccacatctcttcttgattttttagtcttatttccttagtgttattatcatacttcccctgatatatggccgtacttcctggccctgggcttgacatttcccacccttcattctccatacatatgagatgtcagaaaacatgcagtaattgatattatgggacacattggaaaggattgaatctggaattagttctgtccactgtggaggggagaggaaataatgctgtaaatgttgagttacagaaagtccaatgtcaaatatagtttttttgtttcctttcaaatgtattacagactgtgccaaaacagttaccaattcacactgtcaatattaaagtataccatagtatacaaattagtcagtacttgctgttaattttaatatttctgatttaacagttagttattaagtggtacttcattgctgttttagccaacgttttaaaaataatttgggagtttgactattttggcttacgtactcatttccttttctctgctaaaaatgttttgcttgtgtgcgttcctgatttttgtcttgtataatcttgatctttgaaaaccctcaaacatgtattaaattgttgtaactttttttcattagagggaagacattaaggggattggggacatttgtttcacacatctgcagtaatatgagttaactaatatttaacaagctctttctttacattagctgctgttctcatttgtatgtattgtcatatttaatcctcagagtaacctagtgaggtaaatactgttgttgtcagcatggtgtaatcgaggaattgagtgagttgagcagaaaagttaggaaacttgctcagggtgataatacagttaggagtgtcagggcccatggacaaatcttgtcagtctccagaacctaagatatactacgtcactgacagcttgaacatttgtatttattgtacagaataaatttaag

SEQ ID NO: 16227 - DNA, 784 bp, Homo sapiens
ttttctactgaaatacaaaacatttcattaactgctataggatctgtctgctaatggtgcttaaattctcccaagaggttctcacttttatttgaaggaggtgttaagttaatttgctatgtttcttgcattatgaaggctacatctgtgctttgtaagtaccacttcaaaaaatagttctgtttactttctgcatggtatttcagtgtctgtcatacattaaaaatacttgtcactgttttaagatcttgactcttcatttgtttcagaatagctcttctactgtattctgacaactctttgctttatagcattttgttgtattcaaatgataatggtagcatttccatgcttgtgacagcatttttaagttattaatatattttatcaacctttccatcatgtctgttttcctggttttttttggttgttttttgaccagtaaaatttattttgtaataccaaataggatttaagaaaattaacgtatttctttactatggaaaaccacattgtcatttgtgacatcatctatattaaatatggttttcacattagttatttgtcacttacttggaaaatgatgctgttaggtcctggtattaaaaatctagaaaagacttgttggtttatgtgctgaaatgtctttatttataattaattttaactactatttacttcatttcggatcctgtttaacaaagatacttgagacatccatttgttttaatgaaatctgtatggatatggaaatgcttgccctaataaaagcctacatatacct

SEQ ID NO: 16228 - DNA, 936 bp, Homo sapiens
ttttctactgaaatacaaaacatttcattaactgctctaagatgtgtctgctaatggtgcttaaattctcccaagaggttctcgcttttatttgaaggaggtggtaagttaattagttaatttgctgtgcttcttgcatttttgaaagttacatattctccactgctttaagaaataattcagttcactttcaccttggcatttcagtatctgttacacattagaagtagttgtcactatttcatcatcttggtttttcatttgttttagaatacctcttctgtattttgataactcattgctttatagcattttcttttactcaaataaggattttacatttccttgcctgacagtatttttgaattatttatataaaatatctatcttttcatcatgtctatagttcctgagattttaaaaaaatttgcttagtaaaggttattttgtgatataaaatgggatttataaaaatattagattgtttatttctttactgtggaaaagtacaatgtcatctgtattaattattgcttttacattcattgattattagtcattctaacttggaaaataatgcaattgggtcacagtgttaaaaatctagaaaagacttgttggtttatatgctgaaattgttcatttataattaattttactaatttctacttagtttggatcactaacagagatcttgggacatttatttgttttaaagaaatatttatggttatggaaacgcttgccctaataaaaatcctgcatattcattgtttttttaaattcacattttatacttatatgatctctaaagctcttgctatgttgctataagacagtaatatagtgataatttaccaactttattgaaaatgttgttacatcaataaaatagcatgctgggaacctgagaaggaaggtttctttagtactgcc

SEQ ID NO: 16229 - DNA, 2343 bp, Homo sapiens
acctagccgacggttatggaaacccattgacattccaaaacaatatatacacataactatgtatttgtgtgtgtgggtgtgtgtatatatgtatatgtatgtgtgtatatatgtatatgtatatacacacacacacataaatcagccaaaatcagagaaaaggaacagggatttaataccttttttatgcttatttttgtcaaacatgtactcctttcatacgggtggcttttacaaggcaacttccgtcatttaatgttttcaactgtaattgtcttaatggaaatgttaaaattcatatctgattaacatttttaataacttagaggagattttaactttatttaaaaataggtaaaattattgtacctaattatgtctaaagtttattcaggggtaatttccctgatgtctgtataaaatcaagatcttattttactgatgcataagtcctagtgggtcaagactaggcatatgctttcagataaataaggaattactccaatcagttttccccaatcaaagaagccatgtcattttacttttagaaacatacaattgggcccaatatgggaattttcataatagttcatacatttgtcagccaacattaaaaggtaaccaactcctcaggtatttgtagtttaccctaacgcttctttaaaagaaagtaggtaaaaaaagaaaagggtagataatctttcgtatgcaaacttttcccttatattttgtctttctttcctttttgactttagtagcatcctccacacatttgtgtgcctgatttgaaaggaagctggggcacccagcgagtttagcctttaagtttctgtgtattgatttgcagattaagtaatgctgggaggaataaagaagggacagaaacatggaacataaagcattgaaaattccggtgcttgggcttcggcttcagagtaacgtcagtggcttagggttaaacggccattttattcaaatgcttgctatacaatctgaaaacacactggcaggtgctcctctccttggcaattcattgagtatccagagttctacgatgtttaactgaagaattggctaatgttttgatcctccagtgtgactgttgtttttgtttgggggtgggtttggggttttttgcttttttattcctgaagcttaccagatatgaatggctaatactccattgttctgcttgttgtaatggtgaatgctttaagaaaaaaaagtgtaatttgctaagaataattcatgatctgtttatgcgataactcctttttgttacaatttttttaaaaaaagctatttttgttaatgtaaagtaaatatttcagagcaaattttttaaacttattgcactaaatacaggctctgtacaaaaaaaaaaaaaaaaaaaaagcctcagcattttatcattccatggaaggagaatcttttgaaagaaagcattgcctcctaccagaactagacagtgaattagatcggtattatggaaatgcatacaagtaatgtcactagggcttaataagcagccgtttgctaatgtgcttcctttcaaagggttggacctttaaattgctgcaaaaggtaaattgtatttttttttaagtattggtgttctttactctagctaggctaaaatttgctaaatgccttggtttcttttaaaagttcatgtaatatttctgatttttcagaatatttgcaataagagtctggattttaaaaaacacatgcatacacacaattaagagctcatgtcttagcaagatctgggaaaccaacattgcgagagtagctattttgaaagaataattctccagaagttaacatctaatatctagtatcaccaaacagtatcgctgttctcttttattcatttgaaatgaatataattatataactaacaattgtccaaatagatgagagagcaaatcatgtgagaaaattcagaataccatctgtttcatagccgcacagattttggactttcacaaacattgggaactaaatttagaattggcaaaagtctagaagatgggtatcaaaacagaagacattccaggagctagcaattttaagaggtgtccctccaaagtgacctgatggaagtcctgaacttggaaattaggttctactcacttggacatccctgcatcatggactgttgctgctccctgttccatatgctcgcaatctcagctatttggaagctaccaggaatgctttctaattatcatttgcaactagaactgtaatcagaaagaaattttgtatttttgtataacttgattgtgtgccattttatataacaggtcctgttttacaaataaattttgttttact

SEQ ID NO: 16230 - DNA, 39 bp, Homo sapiens
tttctaatactaataaagccttggggtttcttgataagt

SEQ ID NO: 16231 - DNA, 2625 bp, Homo sapiens
tgtctactcagaatacgtttaccctccgtcttgattaggtggccttttctgtgcagttactaatcacaggaatttggtagtagtgaaaatcaggtttgctgtgttctgctttgaggcctggaatcttttatcattaaacacctagtacgaagcatttgcaggaacctactgtgcagtatcatagaagcaagcagataccaagcaaaaaactgatgattgaagagtaaatgggggaaaaggcagtgtttaattaacataaaaactcatttttgtatttcttggattactttgactattctaatgtttaattacatatggtaaccctaaggcctggggagaaaagcttttaaatcttgccttctttcttctgtactttgtctttttaaaatctcattactatctattatttagttctaacacagaagctttaaaaatacatagtcatccaaggttttctaaaaattgaaatcatatgttgggaatggtaaaaaggttttcaaatggtttatttttcctcttttataaataagttttacaaaattttcctcttttgtttattgactagattgtatataattttcttttttccaaaatattgtgataagaaatttctagacacaacagcttaaaatcacccaaatttcagttctttacctactgcactaacaatggcaaggggggtattctttatatgttgccttgtttaactacagttcttttcattccatcactttaggtgatgggtaagatttttgaaagccttatattttttgattttgttgtctagtttaatcctacctttaatagttgtgtttggtaaaattcccacttgaatgtgacactgataataattatgctgatttttagcatctcttataggaatcaaagtttattaaagttacatagaggattgaaaaatgtatatcactcaatttttatctaagaaggataggttataaagggaggtacctaaatactcaaataatgtatatattctttttcataacatatggaatgctttaagcaattgttttgaaaaaaatctgcgtatctttgacttaattggcacatgactttttcaagcagccattcattcagaggtttgttttctctcagtccttttgctacattcactttcttttcaaagaaatgttaattattacaaaaattgacatagatatctttcccaaacttggggtaaaacccatggttatgtggaacataactgttcttaaaaagtcaattataatttgtaactcacatcctttgagctaaactaaattaaaattacagtatttaataattctttgggcatttttaagaggtctgaatttgtatttttcttcatttttgaaactttacatttgttgactttttttcattctcatttaaaatatattgtgctatgataaccaaccttcttccaaggagtgaccattactgcctacatttgcgttgctttctacatagagacttgtataatagtattaatagtagctcattctctctaaaaatttactgcccactgataggatgttttgtttccttgataaaacaaatgtaaatgaggaattttatttgaattggaatattgtttttctagaggacattcatatctgcactattatctgatgacatgttggtaattttaaagactgcaaggcagtttagagaatgaagtaaaccaatagatactcttttgattctccaaagaaatataattttggtttttgttcctcagagagagtttgaaagaaattttcagatgttctgttccctatagagggcctattccaggatctaaatgaatgggaatttataattcctttcatagactcaaacctgaaagcagaaatttttagtagttgagttgctttaagtgaattttaacaaatatgacacagaaaaggtcagatgctgttgtataaaattttttactagtgtgtcttatataattctttcttctcattaattcagtgcctttttcctctaagcatactcttggtccatgccccatgcagtgtcaactgatgtttaagctacagagcattgttgtagtggtgagggccctctgttgcaggggcatggggaaatgcatatattaatcaggggctggaggagtatacatgattcttgtgttcatgttgtcatttgaaactcttcacataaaattttctaatattcatttggaaaacctctccactggagaggtttcatctctgagaggttttgtaataatagtgtaagttcagtaaatccagtccaaattctcatcacatgtattatttgatactaaattttcaattattacttcaaaataagagtctgaggatttcttcttactggcgttcttaaaggtctctaaaattaaagaacaagatgtggttttttgtttaagacgtttttagtttatttgttgttaagttaaactggagaaagtttgtcatcctcattttcaaactgaaaactaatcaaatatagtgcctatttagtctcaaaataaggtaactattaacttgattatactatataatattctcaattacatttgaatttaaaaatattgagctcttgattacaatttaatacattgtaaaaagtattaaatcctttgaaacatctttt

SEQ ID NO: 16232 - DNA, 5853 bp, Homo sapiens
gatagtaggttgaaatgggagaatttctcttttggaaaaaaaggtagataactgtttaaaaaatacatgtctatttgtcaaacataagtgggaaccaaagaaaaaatgtgacaagtttgaagacacagaaagagtcatctgatgtaattctctcacttagtactgaggaattttcatgtgccacatacaatgctaggttacagtggagaagcctagatgaatgagacaaatacctacttcttttattcctccttttggtaaacaactcaattttcctttgagggaaccctcccccaccctttgaagagttcaagttctgtacaggtttttaaaacgtgaagtaatgtttgaactggaagatgagctcaccaggcaaagctaaggaaggatatactagttgaaaagaataacccactcctcttctgggcatttaagctggtatgttagtgctacttttaagattgtggagtctgagttaatattcaagtgatcagactttgagtgacatcaagaaaagatgatatcaggttcatttttcaactaatcttatgtggaattgaattagagaacaaggcattattcttttagggaaggtgagagcttatttgtatcagagcttattacttgtcaggataagtaaatttctgtacatgtactgttttcatatgtgaagtgagaagaaactttatgcttgtttaatgcttaaatttccatccattgtgagaatattttcactgacctctgatggcacttgttgacaaatcattcaagtgagaccatgttactagacatgatcttgaaagaggccatgatttcacaaaactcatttttattttattctcagacagtctgttaggtaaaaatatgagaaattcatgtacattttatattttctgaatttataatctgtgcactcccaattttaatgacactaaaatattaatagaattttttaaatatactctaatttttaaaacatactctttattatcttcatttatcaattacagcttcgtatctctaatttatggtctatataccaatttaaatggcatgtaaacctgcctgtttcttctcctcttctaatatatcagatctccaaaatggaagctaaatggtggacttgacaactattcaccctacctcagatcatagagtttgtaaagtttgtgtccctccccagtttttcagtctgttgaatgtcgatggggcaagaactcagacttctactttaccaagtaccacacactctggaatgctttagtttccttttcccctcaagatgtctgagtcagctaggatgctgtttaccccatctctctcttatatcacttgaatgatatattgtaagtgagaggtaaaggaaaatgtaggcacaataagcactgctatttttctctttgtctaggaaaggaagctgaatcttatatcttatctatgctatttaggactactttctggagcttggcagattttcctctgacaccagagaacaatagtagtctcaagaatggaaacctgaatgtctgagggaatgggctggtagactttttcgaaaacaaattagagaaagtaacttacaaccacccattccggatttgtaaagcaacatgaaaacctttgataaatgataaccaacagtcttctgtcctaatttgcattctcaatgcagaattattgggtctttcataaataacatgagtggtttctggagacatttaagattgtcagcaaacttgtcccaaaatggcacatcatcataatccattttctctttgctagaaaatcagcccatagagtgcattcccaaattctaaatagctgaccctaaattcatttttcatgcttaaaaataatagaacaaataataatactatttttgggcaaaatccaccctacttgatgaggaccatttgcttgtgctcagtatttagaaatgcatacactccacatttctccccatttccaattgggactcccattctttgccaggagatcttacccatcccttttcagattaatcttttatcctttcctgaagtacaaagtcttaagagtgtctgaaatccaagacatcttggcccaattgacacaggttctatattcttccctacatagaccactggctgctgaaatacttttcttgtcttctggtttcacaggcttcagctcatgggttccaccctaacttggggaaacaaaagccttctctagaatctgaaggccaggcttacctctgattctgattcatccatacttcatcttatgtattttaacagttgggttctgtggagtgtccagagaccttgggttaggtatatccatcttcagtacctcattggatcacttttctttcatcacttgagtattctagcagtcattctcctaatctgaccactttcaggtttagtttacctggcttacctggggaagttgacaacttgttggtagttaggcacccatgaatgtctccagagacatcctgagaggcaagattcctcttaattgataaccaggacaaccaggtagtcacccagtcctctctaagcagggagcacttgtccttctctcctctgctgcagctactgatatctggcccctggaataaaaccatagttcctaaaattgagcatccctaagagtagctgcttggtgggacagctgatttctttgattccctagctgcaaaacctgaaattgaccactaggtgacagaatgtttgccagtatccccacaaaacaagttaaaacttaagtgaaaatcattctgcttttgaatcttaaaagctagaaaaaccataatgtaatattctttttaaaccctcttattttataactaaataaataatcacagaaaagaatgatctgaacaagaacagctgaggctaaaacccaagactgccgtgactcctagtccaatgtctgtttcgcatcacaacacagtatctttaacagtgcttgagatgcttaacagagaaggcatccagtgcttcattgaggctaagtctcagggtgtttctgccgcttagtatctttttgttcagattgagaacctaaggcgacagagaggtcaaggggaagtattttctagttcagaattcagaattcttaggcaaccttcatacctttatctggaaaatgccttctctccagacaataagacagttcacatctggagacatcagcctttggtacctaattctctaagctcaagatgcatcccattgccactttaccattctatttcccaagggaaccatcagcaccaacctgctaaatgcctgtatttgaagtctctccccttcctgaagtgaccttttatgaggctctttccttcctaagggacctttccctggtagtagtggtctcattcacaaaaaagaataatagatgtaactggagtcactttgcagttttcaagattttttttttatctgcttggctggaaaggagactagagtatctagtttttagtatttaaactacttttaattatttatattgatactctctgataaatgcaggtagttaagaatagattgtactcattcctttttgagtttgtgacctcaaaccattgtttttattcttacacgactacagtacttcaaatggcacatagataggcaggatattacataggtaagcaggaatttatacattgggtaccagagctaaatctggaaaacacatttggaatgagcttccacacttcagtctaaaatctcacccaaacttatggctacatatttttctaagtttcccccctagtttcactttctggaaagtgaacagttttttaaatcctaaatgttataaatccttaggagaaatattccctcaaaacctagtcaagaaagtgccacattcccaccttctaacaggtaattattagttgtaatagctttaatgcatggaaaaacttcagttactgaccagtcaagagaatttctcaagaaaaatcccagcaacgttccctctttcctccttgtcttccactatcattaagacctgggctagatcacctctaacatctcactcagggaaggcaatgtgttgccataaaaagaccacaagcttttgagttaggcctgaatttgaatttcagcttaatcatgtgggatttatggtgggggccctttcagtctcaatttccacattagtgaactggggaaatgatacatacttctaagggtttttagggggattaaatgaagtatacagttcttagcctcaggcctaggattaagtaagtactcaagaaatgtgcaattttctagttccatgtttcttttctaatcttcaaatggaattatagaaaccatgggtcagaacatattcctttactcaaaagattgcatgactgaatttgcttaagaaaaaaaaaattgtatcaagtcattaatacaattatacattaattatattacattaatacaatatatggtttgtgaattcagagacattaccagtttgcctccttctctcaatagaacttgtattttcattttcttggttaagcagttgtctcctaatattatcccatatgctacctagtttgctggtcccaagcagtttactgtacttcactagatttggtacctgctctcccctggacttctttttcaatattctagcctttcctagatgtaaatctttacctccttgttagtgaaattagatataagccatgatttggagagggaagaaatctggaatacttaatttcatttaattatctatgctgatgaatgcctgtatcattgttaataaaggagaattgaaaatactcatttctactttctgccctcaaatttctgtttctatctcaactaggcaagaatcagcagggtgcatgatgccattttaagctgcttcacatcagactgaaatcctaattacagttcataagtgaaacagactaattcaatggcaataccttttgtataggtcctgtgcttaaaggaggcaagtataaattttctaataagaaatccctgcttcttttgggtgcagtggctcacacctgtaataccagcagtttgagaagctaaggcaggtggatcacttgaggccaggagttcgagaccagcctggccaacatagtgaaaccccgtctcttctaaaaatacaaaaaaattagctgggcatggtggtgcacgcctatagtcccagctacacaggaggctgaggcaggagaatcacttgaacccgggaagcagagtctgcagtgagccaagatcgcggcattgcacttcagcctgggcgatagagcaagactctgtctcagaaaaaaaaaaaaaggaaagaaagaaatctctgcttccgtactatcaaaacttctaccctagaataccccctggcaccttctaacccaacctaatacagagattttgtagggacccattaacaagctcctatataattataagcagctctcacagtagggttgaaagagaatataaggaaaattagaagtactgtatttttgctattggaaatgaaatattgtttcatgcacctttgaaaaaaataacaggattttacagccttctgatgattcattcaaagcatggggaatagttcatatgtttgttaaatgaaaatcttatgtagctatttgtgtgtccctcccacttcataactacaaaaacatatatatgaatttctaaacaaagtgatattttaaagatgaattgattcaatgtgtacttaccagtttactgtgtggttttatcttcaggtacagatagtttgtggtactacttgaaaatacctttaatattattttcatcagaatttgtaatatataatccagtttgggatgatgaataaaatttttctaatctcttg

SEQ ID NO: 16233 - DNA, 1083 bp, Homo sapiens
atttacgtgatgagctctacaaggccaaaaattttttttcttatctacctgttatattgtgctaatttttctatgtatgtgatgtgaaatgaagactatatatatggaatggaggtgacagaaagaaagaaattctttgtttgagggagacttcccctttctggattgtatttgtagagtgttacgagtgtatcatgtgattatgctttaccggtataagagattctgttgtgattatttgaatagttttatattaataaaagaagacaaaattttttaaatgttagaaaaagcagatctgtcattgcaaagtaacaaaaattttaagcttttaaaaatgtagatttttcatatttttaaaatttgaatctatttgagctttagttcagcagaattaaatttttacttgacattatcattaaaattgctaggtatggagaacaattcctattttattttgaacactgagaagagtaaacttttcctaaaacactttatattataaatgaaaataaattgctagtttatattttagatataaacatcatattttttattaatacctacatcaaatggaaaatatctgaaattttttttccatagcaggtattttctactagaagtagttttactacttttcatttagaacagagtatgagtcttaatctgaagtctttttcatgcccttgttttaaaaaaactactttttttggcctcaaaaaaatcaagggtgtaatttttaataaattgttaatcctatgttttgtaattttcattttaggagcttgacttatttttttctctctcataaaaacacatttgttttaattgtaggagaaattttctcagcattttgcatgttctttctaatctttgttggtctgaatatattggtagtaattactgtaattattcaacaaaaagcatatccgttcaaaaatttttccactatgtcttttttctagtggctactgttttagttttctagttgaatatctctgacaagctttcgtatggttttgttatattttcatctacatgtaatgtgttattaattttattaaatgaaaactaatcaccttc

SEQ ID NO: 16234 - DNA, 478 bp, Homo sapiens
gcgtttggtgaaattcttaatcaaaccttacttgaacagtgatgaaaaagtgggagggctggcttgggctgagaagggagggacagaaaagagaagacagaacaaagctgctttttaggactgaacaatctattttcaaagcactggtacctgtgtgagtgagtatgtaaattaaagttatttaaatggttggaatatgtggctccttttccatcactacatcttttcttccggatcttcatcatggaagtttcatttgttgcggaatatggaagcacctcccaatggtacggtgcaccctgtggtggtcttggacagtatgtggaaacagaagctccatgacggtagaagacttctcattggggagcaactttttgacgcacaacttttggtgcgtttttctagttttaataccttaagctttttcaagacctaactgcagccgctttgggaaaaaaaaacaaaaaacaaaaaacag

SEQ ID NO: 16235 - DNA, 2532 bp, Homo sapiens
aagggacttttttatatctcacacttcacaccagtgcattacactaacttgttcactggattgtctgggatgacttgggctcatatccacaatacttggtataaggtagtagattgttgggggtggggagggagggatctaggatacagggcagggataaatacagtgcatgtctgcttcaattagcagatgccgcaactccacacagtgtgtaaaatatatacaaccaaaaatcagcttttgcaggtctttatttcttctgtaaaacagtaggtaacttttcctaggtttcactctttttagtgtactagatccagaaacttagtgtaatgccctgctttatatttctttgacttaacattggtttcagaaagaatcttagctacctagaatttacagtctctgtttcatggcaacactggataatggctttgtgaaatttaaaaaatttttgtagcgactgtaaacagaaatgccaaattgatggttaattgttgctgcttcaaaaataagtataaaattaatatgtaaggaagcccattctttcatgttaaatacttggggtgggaggggagaaagggaaccttttcttaaaatgaaaataattactgctattttaaaatttcttgatcattgaatgtgagacccttctaacatgatttgagaagctgtacaagtataggcagagttattttcctgtttacattttttttttgttttggggaaaaaattggtaggtgtctaattactgtttacttcattgttatattgcagtaaaagttttaaaacaaccattgcatgtttgcttttgatgtatccctttgtgaaattagcacttttggggccaatggagaaatgcagcattcactctccctgtcttttccccttccctcagcagaaacgtgtttatcagcaagtcgtgagtcaaactgctgccttttaaaaaacccacaaaatgctgattcagttcaaaattaatgcaaatgtttcaaaactgggtttctgatatttgtaaatgtgtttctttattagataagagtgtattaccattaaagtcattagtataatattgctttcaaaaagaaatggtagacaaaactataatccagcatcttttattgcattggaaagactggcaaagtcttttggatgggttgggagatgtggctggaaagtactttggaaaatatacaatcaagatatctcatggcatattaaaagaaaaatcttaatagcagtgttggcttttatttggattttttcatctcagttttttctgtggaatctccttcattggcattgttatttaatcataaacggggcagatgtctacttgttcagtttttcaaatctgttttcctgagtataaataagagtatttaaagaaataatttggattgcttttgttttttgtttccttttttttaaccatctgatactaagaagatgaatttgcacagatttctctgcataatttctcaatatctttagcacagtatggtgatgatgacttttaagcatttacatcacgtactcataacctattatgaaaataaatgaaactggctgggtatggtggctcatgcctataatcccagcactttgggaggccgaggtgggcagatcacttgaggccaggagattgagaccagcctgaccgtcatggcgaaaccccgtctatactaaaaatacaaaaaatagccaggcatggtggcgcacgcctgtggtcccagctacttgggaggctgaggcatgagaattgcttgaacccgggaagtgaaggttgccgtgagctgagatcacaccactgccataaacatgacaggcttttggactttgtattacctgtatgttttataatggatcatgcataatttctcaggagaataaaatgagaattcatatatacgttcatctttcaagtcagagcaatgagttgggaaaagaggtggcatttctgatcggataatggaatactctcatttattttatgacattctctgtctactcagatcatagtgaaaactggaaacaaaaaaaaaaaacagcctcttcttggaaagtgacagcagaaggtggcatggagcttgtgtccttggacaacaaatctggatatactaggattaattatcagaagacagctcaggccaagttttgatcgttccatacagtaccttgtttatctgcttcttaaagaatcagccgagacaccataaaagaaataggctttttgtgccttttgctgttaatgtttaatttacaaactgttttggtaaatctcttaatgtaagtagctatttgactttggaattttgcattcgaggtatactgtcatttcttgaaatctttttctcgtttagttgctctgtgggaaatgtgaggaagcctaagtttgtatttgtaaatttcttatgccatcctctagtcaaattttttttcattgtttaaaaatacggaagtgttccaatataattttttcctgtactggatggctaggattctagagaattgattataaaatattttcaatac

SEQ ID NO: 16236 - DNA, 125 bp, Homo sapiens
acagcgacgaggatggacactgcactggcagtgcctaccctcgacagggtgagcgcactcctacacacagggggtggagccggcgcttattcctgtagcattaaacacccctcatatgcccctcc

SEQ ID NO: 16237 - DNA, 1269 bp, Homo sapiens
ggattgacatggaacaaaaagcaaagtgggattcttgttacctggcctaaaccatcagggtactaaaggagaagaaccagtatatgtaaagcatacctaacagccagccatatgcaggggaggcctagtgcttcacttagttttccctctctgtcttcataatgagccttggttcccatttgtctacagcctgccagatctggcctgcccatgtactcacactgttctcttgcatctctctaacaactggcatgcaaggcatgtttttctgattaaaaacaaacaaagctctttgaagaagatttagaaaatacagaagagttttaagtagccaagtaaaaataatttacccatcatcccataatccagaagtaaatacatttgacccttgagcaacataggtttgaactgcaagggtccacttatgcatggactattttcaactataaacgagtcaaaaatatatcattaaccaaacacgaaacccacttatagagcaggttcatatactcaggttccaaagggccaactgcaggacttgagttctcacgtatggatttgggtatatgtggaagttcctggaaccaatcccctatgtaaaccaagggataactactacattttaacctacttctgtttgaacatatggtatggttattgcttttgcctcgttttcctaacagtttgaagtttaaaaaaacctaacccacctttcttacccagtcttctataatgtgcctaccaaaaagcctagtcctagcccatctgcctcaactcctctcccttttaggttgtagggaagaggccggagtgtagagtatattatatcttctgtcccccttatgccaacaagatggccttcccctctgaaacaaagtaaaactgcaacactgtgacttcttaaatgagggatatgtgaaaaggctatgaaaaatacaaaggctttcctaggaaatgtgttataatgcagcgggaagctaattcttgaaatatgcacattatagttactcagtctcacatactctagttactggcaaagaagttactgagaatatgtcattcaaaggcataggggcctttgaatggaacaaatgctttcacatcatttaaagtaaaaaaaaacctccaacaactgtgaatttatagtttaagagtgatttacactgaatttcaaataaaaggactataaaacgtgttatttttctgtaagggctataacatacatgtcaatatcactgtttttaaataaaatatacttttatacagaag

SEQ ID NO: 16238 - DNA, 8050 bp, Homo sapiens
ccacttctttcttctcctttcttctgggcagcctgtactctccaccactcacgtagacctcactgtaccactaactgcaatactgtgaactggaagcaaacacctgccttgccttgcagttgaattgctttgatctctctcattttttttccttttcctcacctgagagacaacgtgcatgtgtgtgcttcattctctccaagaacttgcttttcctctaaacctttccttgtgtcttcaagagtgaatcacttccttcctgctcgattggaatggactcttcgtatcagccagtgatatggtagccttaactcacttgactggaattgaacccattggcactgggggtttcattttgtagtgtgttcctgtaacgtagtcacacactgccatgtctctggtttctcacttgcctcctttgctgtggatctttgtttttatatcttgtgtggcaaaatgctgttggctctagccggttgctagtgtagccaaaagtggaccttacttagtctgtccgatctagggtgatgctttttgctgccttacataagcttccagattacagtattgtgcattcatggctttctttctgttaaaactgaaatgaagtcaatgtagaagaacccagagcttgtcacagctgaaatgtagggactgattccataacctgcccatcagcggttgtctctctttctatggtttaaccgatgaaccctttatataagaagcaccattttaaaatttctaaggacatgaaacaaacattgtttgaagcatcagtagcaattgatctccaaacttaggcaaattcacaagccttgtttctattctcttaaaaaaatgtaaatttttatattgtttcttttttctggatattttctggtcatgttaatctattttcaatgaggagatcatcttgagaagtatctttgcagtgaccatatttctaaaacagtctgtccaacctacaatggttgccatgatgctcccacttcatcatggatggtgctgtaatgcattaactgttcatctcctccccagttgattacaaagccttgcatccatactcttttctttctggccccatgagaaagagaatgttttaggtaacttcaacttgtaggtttatctgcccttcaaaaaaaaaaactttaaaaaacttttaaaaattaagaaagacctatcttctcaatgttaagcacttaatttcataacaaatattaagtggcacatagctgagcttcttagggcattgttttgtttttagcttctggagattccagaagagcaaagaatattttttatctagaacacaatgaacagtttttgaaataccttctcagcactcccccaaagcaaaaagccacatatgtagtaaaaccaaagggaaacaatttaataaaataacaatagtatagtaatgaaataaagatataacatgattactggttttaataagagttatcttaactttaagttatttgcccatttatagcattgttatgaattattcataaaattatgtcccacagtatatagttttgaaaaaacatatgatatactacatccagtctaacttctgtggaaagtagatcagaaaaaataagatagtcttgagagaattttattatagaagctgtctaatttgacctattttgcttgctcagtgctaaatctattgcttttttttaatctcctggcttgaaattatatttacttcaataggaaaggtaaaaacatcagtttttacttttcaaagttaattttctgaaataattgcattttaatgagcacaaaatgggtcattttatttttattatactcatcttgtttacacctatacataaacagaaaacgttaaagaagagaaaaataaaggagctaagttctgctgttgaagattatttcatccaaggcttggttttgaataactgagggaaatatctctaaatctcaagttcatcaaagcagctgcaatggaataaaattgctattttatcgagaaacctggtttggatgcttataaattccactactctcagcttcattttcctgagtacgtggtcactgaagcatcatttagacattacataaactggcatgcagataaacctatttacatagagggagaaaacagtttcaatgtcttggacaatctgttattttaatgatttacttaagaaagaaacaatctgaaagcttaccatagcttatcttttctactcacttggagattcaagctattcaatgtgagttttaaaaagttaagcacagttagtgagtgaaatggtagaatgtagaacctttaagcttgctggttgataaacagaatcaatcttccaggacagataattccctgaagggacctatccttgcataagtgaactagttactcatacagaaaatgatctgcacatcttactacaacactacacacaagaactaaaagattaatgattatctgtattctcttcactaattactattatgggggaataatgattagcaaattatatgaattcgagttctctctatacttttattagtaaagcttatcatttaatggactgaagtaagatgtgttacctttattcgagctatttgtagccacactaaatgaaggtgtgtttgaatatggcgcatatatttgcatatgtcccatcattttcttgtcataatggggaattcaggcttagccagtacttctatgggatgagacctataatcccacctatagcagcaagtaactacccttcatgatgatagtgtacatggagctgtgattatgaacatgctgcctttcctgctgccattggcattctctctgtaaattttattatgtgtggtatcacactctccaaaaatgcagggtatttggttacataaccaaactaattaaagaatcagtaatgaaattgcaaaaccatgatcttttttgagctaatgattagttgggctttcctttaaaataatataatcaggccgagtgcagcggctcacacctgtaatctcggcactttggaagtccgcggcgggtggttcacctgaggtcgggagttcaagaccagcctgaccaacatggagaaacccccatctctactaaaaaaaaaatacaaaattagccaggcgtgatggcgcatgcctgtaatcccagctactcgggagactgaggcaggagaatcgcttgaacctgggaggcaggggttgcaatgagccgagatgtgcactccagcctgggcaacaaagagcgaaactccatctcaaaaaaaaaaaaaaaaaaaaaaaaatcatataatcagttcccttttaaatagaaagaggaggaaaaaaaaaaggaaaagggggggtatctcatttgtatacaaatagattttcaatggcatttaataaaagattctttaatggttaaaatgataaagattaattctacatatcttgaaaaatcttaatgacttctgtattcttgacttcttaaaaatattttctttcttttagtgtgcaataagacaaactaaggggaattttttcagcttgtatctcttttacccatattattttccttgcataagcaaaaaaataataattgcctctaaaactgatttgacagtgttcagtgacatcatttaatattggtgatggggtggaagagaaggtagggaatgcccttatggccaaacctaaaacacagtttccttgagccttctgagcaatcttagaattattcagaagctttcaggaaactcaaattctattaatttgatttggttcctttccaaaatgttaatagacatgtatttgcttaaaacgtctacctattccatttaatttcctgctgataaatgtattttatctacaagcaagtagaatattttgttttggttaaagtcaagtttttataaaaggaggggaagtataagagagagtttcctagagatacaatatcatctctggagcaaaatgttgaggccaagtgtaaaaacagactatttctctttacttcctgcagaatttcatttcaagggaccacagcacacccttgaaaattaccatttatttaatgccagttgaaccaatgggtagcaaaagaggagggagggaacatggtcatagagacaaaatctaactactataccaggtcttcctttgtaagaaatattagccctgccaatataaaacgcagatggacatagacagaataagcatcgaggactttttcttatttacttgaaatctagaagctcagtcatctctgctcatccctggacccactggagagttttactcactaacaggtcctttcctggaagaaataacctcatctcctgccatattagtttacaataaaaatcattccaaagtgagccatttcacattgcatttttgccacatgcacatttgctattgaaaccacagattctcagcataagtaagacataggtgtttcagaaacttcataaatacacgatctttcaggtgctcctcaatttcttaatcaaggtatattgaactccagtgattaggatagaacctgaaaacatcctttgttctattggatagtacaacacagcaagagcacacagttatttgtataataaaacaacttaattaatgaggaagatgggatgtttgattcctgctaccaccagttcacttcacaaaggccttcttctggtattaccaggaaaactttcctgcattttctagggaaaaagaaaagtcgtttattaggagcacaatgcagatatgtatctgtgttttcatagcttcagcaaacttcttagtaaaattcccatttcaacaaaaaccaaaatactgattgtttgaatgtagaaaggtatagaataaagactacaaaggggaattttaccagggctccttagaccagcttccccagcataatttttatataactcaagtaagcctctgcttcccctctcctttccagtataatataagaaggtcggaactgtcgcacaaaagaacttgatttcaatatgaaaatataatatgtaattttggggactgcagactttctgcatcaaagatctggacagccttaacttttataaaaataatttttcaatgttctcttttactaaccaggaaaacaagatgttttctgaaattaatgactttttctattttgggtctgttttctaagtttttacaggttgaggtataaagggtcgtcttctcctcatattgcctcttcataatcacctggggctattttttgcaagtcactgcatttttacaaaaaataaaaataaaaagtacatctcacaaatcataaaattctccctagacttcagacagtccttctggagtgaaagaatagaaatacagaaagaaaagaattacagggtggctttctttttattttcctatggttaatgtactgtatggtatatatgtttacagaatgtatctgccttgtgatgttaacaaaatgaatgacaaaaaatagtactgatgtgccatttgacagtttgccttagcatcactgtttatgttcttcttttctgtcctttttggtaaaaaaaaacgcaggttgtattccaaagctgtattaacacaacattctcttccccactcctacccagccttcttcagagctgtgaatttcattacaggagcattgaggcagaaccttgcaggtgtggcccaaaggggctaaagtgggcataggttgggatttacttctgcccgtctaccaaccaaacacgtatctgtgttctcatataagcctgcaaaattttacaccctgcctttcagggagacaggccacatggagcgcatgacctcttgtagtcgtctcctcacagtccttcccactgtgagagaaggaaacttgcagacccccaactggatctgggagcatatttttaagcacagttggcattgcttgaaaaagcaagagagatggactcaaattctatgattgagccatgactgaggaatgtgcccattcgttatagtcgaagatgagtaggatgatatgggtgagaataggagtggctgtagaaatggaatattttacagttatgtatttttttaaggaatagtatttttataatgaaatctatatacattatggagcttgagttggaaaacacccttgactgagctatttcttcattccattaaaggtaactttctggggagtcctatagcactaggccaagccttgggggcatgaacaaagggcctgtcacttggccttgcactgccattacatgagatccagtgtttccaaataggccttggttggaagattgagctttctatacctgccattaggtagattagatagatggcttgatagctctctgggctatacttttaataatatataataatctttgggaaggagatagctattttaaatgcaagcaaagcccagaaactatcaaagtccaaatctttcacatatttaaggagtaattgccacatttgaggttaagggaccacttactatggtgcatttgagaaatatatatgaaacggtgagtcagagccctctgaccatcttcagtctacacataagcagataaaccaccaatataaatcttataggggccagacgaggtggcttatgcctgtaatcccagcactttggggggccaaggcaggaggatagtgtgagcccagaagttcaagaccaggctaggcaacatgttgagaccatgttgtttagtctctactaaaaaatataaaaattagccagcatggtggcacacacctgtagtcccagctacttgggagactgaggcaggaggatcacttgagcccaggaggtggaggctgcagggggctgagatctcaccactccattccagcctgggcaacagagcaagactctgtctcaaaaaaaaaaacaaaaaaacaattatcagttggccttctacataacacagggctacactgtatttttagagttaagtagatacaggaaaagattgtctttatccataaaggagattctgaatttttagagttcctgaatattttcccccaagtttctgtcaaattcctgaagtcccttccctatcacactcagtttcctgaagctcttcccctacacctgctcctctgtctggctaacagagttgtcatgtctcagaaactactcaccactcttgtgagactctcttcccaagcatcatccttcctcaggatgaggcctttttctactacccaagagatcaagaccctttttctaacaagacaaggttatatctactccattttcaagagaaataacccctctggttcccatgcaaatcgcttaaattccttcatcaccagaatctctccaacaggcccaactccagcccagctgtgaacactgctgtcatggagacaactccaaaatgaaagaactatgcaattgcctgaaggtgctaatggagagccagtttactctaatctcttattactaaggaacctctcggtttcgagattaagtgggcagggagacatccagtcacttagttttgcaatgacaggtcttgatatacacagaggccaccaggcaatgcctgatccaaactattctgtatgtagctccaactccaattctgtgatatcctattctggcaggtgggaagagttctattctttgcagggttctggaacattctttcctgctctcaagctcctgacttaggagagtcaaaatcatacaggggttccagaaaatgttgtgtctgatgcagcttctcagtgaatgtaggttgttggtgaaattttcagctttagcatctcactcggggtgagtgatgtctctgtaaatactttcatttgtggttggttggtgggggtgggggtgggagcctgtcgtgcttactctgaattagcttactgggctagctgctgtactttgtaacctgaagtgtactttgactgttctgtttccttcagatgaaaaacaaaataaaaaccgacttcagaaaagacactaccagcgacagctgatgctgtacttgtagcttctctctgttcctctgtacagtattaatagacaataaactgccttttcactgcatct

SEQ ID NO: 16239 - DNA, 4012 bp, Homo sapiens
acttccttcaacccaggaagcgtctttggtgcttgggagaccaagaaaccaagaaattaacaactgaaagcattttaatggactatttattaaagtgcaaacaaactcagcaatccttatgtagaccagaagctgcaatatacaatgatgaaaatgaaacgaaaaggaagtccccccatcagactctggacacccaggaatcaaaagagaaaggacttttttggtgactcaatcccagtgtctggtttggggccaatctacaatggatccaaaaggacaaaacatgttacaagcaaatcaacatagttgctgcaggcggaactgagaccagcctctctgggcgatgaaggacaatggtggtagggccacttagagagcagtagggcccaggctggtgcagcctacatggcacaggatatttccctgcaccagtttcccacctgtcacttgcagcatcagagggtgttgcattaactccattttctccagcagccataaaatgaatggcgtttctctccatatttgcccagaagaggcagttatgattccacttctcctacatttaattatttttaattgagaacaactcatgatcacaattcataaaatccatattttaagacaatagttcttcatgtcacaaacacaatctattctacatgaggaggctgagaaaggggaagagaaaaacaaaccaaatggatgatgttagctttaggatcgtgtctgcttataatattcactgatctgcagtttatgagaacacattttcacagttatgtttcttcataggaaaactatatttagtgggcaacaactatttttatgatgggatgggggagtatatacacgtatagaatctgtacgcgttgaacaacttggttcaagatggtgggggcatttttagagcggcaataattgaaaaaaaaggcgaactctgccttggagaggtagatgataagaaataaaaaggtgtttataactattttgtattataaagtgggccttagagataggaagaagaatgatggattccttttggatcaatcagaaaggaaacacgaaagaaaagtcaggaaggtagagagagaaaaagggagggaaggagaaagaatgggaataaaataaggaggtaagagatactatttttgctgagcaaccagtgtgtttcaggatgatacaaagaaaaatatagaatagaaataagtgcaggcttggaatcagctacaaatcctaaagatggggtgtgtgtggatgtgtgtgtgtgtgtgtgtacaccattgtgtgtttgtaaaatgtgtatgttcatgagtaagggtgtgtgtgtgtgtgtattaaaattccagagtgaccgtggcacttgggtgtacaggtaattcctccagagctgtttgctggcttcaggagtggagtgagaatttcttttttatgaaaagggatataaaggcaccgagctgatgcagtatttgtaatattaagttgacctaacaaggtatttgcatgagtcacaattacaaagttttgagcggttttgtaatttgacatttaggagagtctcctatttattctcatactttacattcatgcttagtatactatagaggatgccagctttaatctttctgtcatttaaagcaatatgataagggtattcaataattgggtgccctaaatttctggatgagaaaattttcaattctggccatgagaaagaaaaaaaaataaacagccttctttttttttcctttgttttaaaactgtggttttttaaaaaagcaataattaactcagacctcactaaaaatcatttttgtttttatattgttatgtcataagctctattatgttattctaacaagtagcaatttcacaaaatttgtatgtagatgttaacgcacatttcctttgcttcttttattagactagtgttgactttggggggggacatttattcacaaatgagaagtaggcacaaagtaaaaaatggaaccatctactaacaaggatcctttaaaactgccaagggagctctaacttgaagccacatcctacagatggcagcccaaatagcacatgggcaattggcaccatctttatatggttgagtctcctgaatattttgaatgaattctcaacaaaatgtgctagccactggggacgcaaaacaagtaagatccctgttgcaagaaattcattttatagtgagggaggttggcatggagactaaaattctcaggaaaatgagatccgtgttagattagaagtcctgatgtgaaatgggaggactcaggaaggaggatcgtctttacctgaggatttctagccagaggtcccagatgcctgggctgagaacccagcgataagggggcgttcccaaagcagacacagggataagaacagaggaggcagcagcattgcacagccccaggcacagtggcagttaggatggctggagagtaggatagttctatgggttgcccaaaaaatgtgatgcgcttcatgttttctctgactcatggatctggtagagaccatagacatgatatagactaacttccccatttttcacaagaggaaaccatccttatgacttaccttaaagttttttgttctgttttgaaggaaaccatgtgcttcatgaaacctacagttgacaagagaatgtacagctaagagaaaagcttaagaggccacactattcgcggaatggctttagaggcagatgaagtggtctttgaccacagttgattgaaccagagcacttattgcttaaagaataacagagttctagagctgggggttcttgggccatgctccgtgtgtggataaggaaagaaatactgtttctgggactctcccacagtcacaaagctgttttcactgtggcccctacatctcttaacttttgctattactcctatgctgccttccggattactgctgtctatcttcttgctccactcactgaagatcctattataatcccatgaaaatgtaaattacagtttacttgggagagccagattttctctgtgctcttgagttttttattcattcaagaaaccttgggccaccgctttgtacatagcaccgtgctaggctctgggatcccaaatggacccttttaactttctgaagatgggaccgtcccctggaggaaagtcattcctgcctaatccatcgagagaaagaggcttacgaaaaactttgcctctgatgctcagccccacccccaaatagcacacaagcttgttaaccccacctcttacaaaatgtttagattctgtaggtgttaaaagcctttctggaagtattgcattctgccgtgtttataggtgttcactttcctccagagctgattaactactgacatgacttggctttctcatccagaaattatggaaacagggtctgtcagtggcaggaggccgtgctgtgttttacttggatgacacaatgcagtttacttgcctcttcatacccatgcatgctgctcaccctagacaatgacatataagccgtatatagatcaatgtccacatatatatacacacacacatatatatatataaagtgtaacaaggaacactaaaacagtgttgattcttgtctctgaagacaaataattaaaccttttttttcccaactaaagaatggatttaattaaactatgtattgaaaaaaaagtagcctaagtgttagagatggtgaatatattccattttagttaaagaacaaatttcctgaattttaagcattcagtgagctgccaattttgattttgtgttgctctttacccaaattattttttctttgtttttctttttttgggggaggaggggaaaaaagcagcaatactgtgtttggaaattatactctgtatctggttttcctgtgtatgttaaccacttaaatgttattatcctgctttggttttagagtgattgtgaggcattcaatgcaagtatacagttattttctcattaaaatccaatgtgtgttgagtttttat

SEQ ID NO: 16240 - DNA, 1430 bp, Homo sapiens
gaccatgctctgccttcttgtttcaactgttacacagagatgaccagaggatggggccactgcagtgcagttcaagaggctctggttcggggaagagctggatggagtatgaatcccaactctgggggtattagctagtggagtggccataggcaagttacttaacacttctgaacctccttttgtctttcataaaataaaagctactaggatgagttgttttaaggatttcagattatagtctatgtgagatatgtgcaaacatgtacatatttcccctagaagcaatggttttcagccttggtggtgaccttatagaacataaatattgtgaataatgaaaatccactgaatctaataagggacttgtatcggtaagatgtaaagaactcttggccaggtgtggtggctcatgcctataatcccagcactttgggaggccaaggcaggtggatcacctgaggtcaggagttcgagaccaacctggccaacatgacgaaactccgtctctatttaaaatacaaaaattagctgggcatggtggtgcatgcctgtaatcccagctactcgggaggctgaggcaggagaatcacttgaactcgggaggtggaggttgcagtgagccaagatcgcgccactgcactccagcctggatgacagagcaaaaaactgtctcaaaaaaaaaaaaatcttacaacctcacaaataacctagttcaaaaatgggcaaagattttgaacagatatttctccaaagaagatatacaaatggcaaatacatacgttgaaagatccttaatattgttagccatagggaaatgcaagtcaaactcaaatcagaatgaaatatcacttcaaacctactaggatggttataataaaaaagacagacaatagcacgtgttggtgagtatgtagagaagttggaaccctcatacactgcttgtgggaatgtaaagtactgtagccactttgcaaaacagtttgacagctcctcaaaatgttaaacatgaaattatcatatgacccagcaattctactcataggtatatacttaaaagaaatgaaaaatccacacaaaaacctctgcatgaatgttcatagtaacattatacttcatagccagaaagtataagctaatacccatcaggctgggtgtggtggctcacgcctgtaatcctagcactttgggaggccgagttgggaggtttgcttgagcccaggagttccagaccagcctgggcaacatggcgaaaccccatctctactaaaaatataaaaattagttgcgtgtggtggcacatccctatagtcccagctacttgggaggctgaggtggaaggattgcttgagcgagggaggtcgaggctgcagtgagccacgatcacaccactgcactccagcctaggtgacagagtgagatcctgtctc

SEQ ID NO: 16241 - DNA, 1262 bp, Homo sapiens
tcctggaactacattaaagtggggggaatttaattcaaattgtcagttactgaaaccctgggatgtaaacttacagtattgatcagtagctgcagctttcgtaaattggcagttaggaaaaatatccttttgcccattcatccctcttcttttcaaggatggcaacgactggtaaacagtaattagttggtaaagtcactggaaagggaagaatgcaaaatgattctgaggccagacgaattggaaaagctcttttcttcaggggatttctctctgatttcttctactaccatgtagtgtgatggagagaacttgactgcagtcacataacttggattctgtcccagtttgccaaccaacttgctgtatacaccttggacaagtcatttgacctttcagaattttattttcgtcaccagcagaatgaagggatgggattaatgatttttgccttttttggttttttagttttttattggtatcctgataatctctgaagctgtggacataagttatttttttttatttgtcattactttcaagtttctctagtaaaaaatacaataccactattcaggatgctggacttcttttcttttttttttcttttttttttttcaatttttcttttttgggatggagtctcactatgttgcccagactggtcttgaactcctgggctcaagtgatccttccatctcactttcctgagtagctgacattacgggtacactccatcaagcctggttcctaggatgctggacttctagcttagtgagaatgcagtatactttttgaaaacttcgtgcaggaatccctcaaatgctgtaactaggaatgggtcagtgaagttcaaacgacttttccttgagggagtattttaatcggacaagggaactctttttcttttgggcattggccaacaggactgagaagccagagagcttgcacctgagccatctcagccgtgagagtaacagtcctaggaaaatagatgggggctgggggtaaggaaatgtgctgaagacagagctattctggatggattttggtttgcaaaaattctactttaaaacaattttgcctgtagcaagtacatttttttgcaattggagtgtaaacattctgtgtggcaacagttaaaagctgttataacaatttgcttgggtgtgtgtgcatgtgtgtgtgtgtgtgtgtgtgtgtatacattgttgccactatctaaaattagggcatttcatactaaaaacaaagcttgtctt

SEQ ID NO: 16242 - DNA, 1127 bp, Homo sapiens
agattgatggaatgctactatgccaaaccttaattgtgatattattttcataactgaattattttagaaatgtatcaattgactgctgctcagcagtaactaaaattcctcaagtatttgattaaacagaataatgtcaaaatttaaaccttcccttaaaactttatacataagacatttatgattgttcaatttttataatctatttgtggattttgttaaaagatttcacatgaagatttattagttgccatttaaaatttttatatgtttagttaaaagatttgacatgaaaatttattagataccatttaaaaattttatgtgttatgtgtttattctttgagaatgttaccttactgtttgtaatagtgctacatttttctgctttcatggcctctgtattttcacaaaacaccaaaaacagcatttaattatattatcatgagtgtgtttctggacacaaacttctgcagtagaatgacctaacatgtcgttttcattgcagtcattataggattgaaatacgttcaaaataacctctctaggaaagtcttctgctagaatttctcccctctattcattataatattctttgtttttaaagccagtcaaatataatagtcttaataagatcagaaactctccaggagagtgagtctaccctcacgtccttgtaggatgatcttgattatagtcttattataggactataactgtattctcaacatttctccagaaaggaccttgtaaaaaggtcttttgtaccacagtattggttttttcccctctctcttcacttaaaaaaaaaaatagcaaggcagaaatagtgtattgaaaagttgttcatctattatgaagtccttgagtggtgaaaaatccgttgtacatgagaacatttctatgcatttaagccagaaacgaggtacatggctgtgtgctcttctgtcaaccaatgaaatgtgttttcacatgtgtggcagtgcaagtaaataacacattatttgactgaatcaggcatgatactgcaccaaagtgttggtacatattcacggtagtaaatcagtacccctgttaaaggatttatcccattgcttcatattaataaaatggttacaatatatcac

SEQ ID NO: 16243 - DNA, 976 bp, Homo sapiens
taggagagaagtttgctgaggaatgccttcaagcacaaagtgatgaatgactgccttcaagtctcaagaaaacacttttccctaacttttagagatatttcagccctttcctgtggcctggtcctatagccaaaatcacagatattcatgagtttctacttgagtgagaaaactgggtgaaggaatagaattttaaatagtaataactgcttgttttttttgtgcaagtacttttatacataagataaacaaaaaccttaccaccaaacataccaaaatgcacctctttcataagtgagttactaagatttctatacctggaatatcatgtatgtttcatttactggatgtttacattttaggaaggaaaatagttttgtttatttaaacaactgaatacttataaactgttgttcctggaagttatttattccataaaaaatttgttcttttgtcatgaatttataattcctaaatgaagaccagaaagtacaaattgctgggaggaagaataggctttattaatcaactgatgtcttgatttttctaaatgggaagattgctttatttttaacactaattatgggagcagattcttagcaaacttctttggaaaagttaatgttatgatgtgcattaggctgccccatcgtgtatataaatgaagcagatttgatttttgtattcttacgtttctctgctttgtagttgtggctgtacttaaagaaatacagaatttcatatatttaaaaatgtttaaaatgtgacccacagaacattgtaaatgattaaaaactaacatgaaaatattacaacctaaaagaattcttaacttcacaagtgttttacttcgacgatgtgcctttgatttaatttgggacacttttttagaaggatacattattcgtgtttgcaacggtctttgaagagcttggaaataaaatttctgcttaattaatcatttttctatgacagc

SEQ ID NO: 16244 - DNA, 154 bp, Homo sapiens
ctacagctttgtgactgtatataaaggaaaaaagagaagtattataaattatgtttatataaatgcttttaaaaatctaccttctgtagttttatcacatgtatgttttggtatctgttctttaatttatttttgcatggcacttgcatctgtg

SEQ ID NO: 16245 - DNA, 1860 bp, Homo sapiens
aggaaaatataaaaaaaaagtcgactgctatgctcaaaaagtaaaaaaagctcaacagttaaaatctaatgtttgttttctttcctgttatattataaggatatgcacgtttgttctggaaaagatagaatttgtctctaaaagacttgaaattgtaattaaaatggcaagctaatcaaacataagcttcattaagtgggattctaagacagtctgtgtttttatatttcaagggtttaaccctttgagccttacatctcattcactgtctttctccaagaaaagtattttgggcggacagtcagatcaagcagtaaaattagctctttcaaatcttcttgtcatgtaaaatgaagctagtctgttttaaaatttttagttttggattgtatactaatgaaaatcttaatgatgtttttgatttttatatacttattttaaagaaaatcttatatagtacattttacaaaaattataaaaaatgaattagtactggcgaggactaaatgaaacaataatttttcattttgataactagctttccaggtggacttagccataggaaaatattactaatgtaatttaacaaattgctgcatgtattccatttaaaaatatgtttaaattgtcctaaaacaaaataattttctccctaggagtatgcatttggctacagtgttttgaaacagaaaccttagaataggtcattggtatgggctgaactgtgtatcccccaattcatttgttgaggtcctaactcccatttcttttgaatgtgactgttcggagatgaggcctttaaagaggtgacttaagttcaaaggaggctgttagtctaatccaacatggtgtcctttggacataagagataccagcaatgtgtgcacagaacaaagaccaggagaggacacagtgagaaggcagttatctgcaagcaaagagagaggcttcagaagaaacaaaatcaccagcaccttgatctttgacttctaatctccagaatagtgagaaataaatttctgttgttaagccgtccactgtgggaggccgacgcaggaggattgcttgaggccaggagttcaaggccagcctggacaacatagtaagaccctatctctacccccctaataaattaatttaaaaagccccccaatctgtggtattttattatggcagccctagcaagctaatacagtggtttgagaggctgggagggttgaggggaagataaacttttaaaaagctcttatctttcatttcaatcagttaaaaatacttgctcagtgtaacaattttgcttctcagcttccactctaatattgttgtgccattaagcaatttagctaatcctgacatttcttagattcataatgttaggagcatttaatctgtattttacaagttaggaagcagaggatcagagatgggaaaggactagcccaaggccaacattaacaagccctctaacaaaaactttacaatacatttatgttgaatggaactccaagatctcacctctccatccaggaatggagtccatgtaatcaaagtgaacttaaaaataggacagtttcaacaagtcaggagattcacagcaactgatcaaagggagtccagtcaacgtgagcaagcgtgattatgatgaggaagccccctctgctttaatccacacaaggaacgtaacctgaagtaacctgatgttaaccaatctgctgtgtctactatgctgtttccttgttcctgctagtgctgctttacaaatgcagaccattctatcatacctggcggggcttctgttttattttgtaggctggatgctacccagttcatgaatcgctaataaaagccaattagatcttt

SEQ ID NO: 16246 - DNA, 357 bp, Homo sapiens
gcccccactggggcccggccactgccctgtcacctgctcgggccagccagggttggagcagctggagctccttggaggcaggggctgaccaggtgtgacctcccggtctggcggctctcccctggtgtggcctgccctccctttgacttggggtttgctttttaaaatgaaactagatgagtctaaatcattcggatggtttatccaaatgtgcgtcaacttcgttagcttttagaatctaacacaatgtataattgttacatacaagagtgaggaaattcattttctctagtgcctttctagcacaggttttctcaaaacaaacaaacaaaaaaggaaactgttaagtagtcgttt

SEQ ID NO: 16247 - DNA, 1224 bp, Homo sapiens
ctggtgaggaacgtgcaggcactgaggctggagggacatggagccccctcttccagacactatacttccaactgccctttcttctgatggctattcctccaccttattcccagcccctggaaactttgagctgaagccagcacttgctccctggagttcggaagccattgcagcaaccttccttctcagccagcctacgtagggcccaggcatggtcttgtgtcttaagacagctgctgtgaccaaagggagaatggagataacaggggtggcagggttactgagcccatgacaatgcttctctgtgactcaaaccaggaatttccaaagatttcaagccagggagaagggttcttggtgatgcagggcatggaacctggacaccctcagctctcctgctttgtgccttatctacaggagcatcgcccattggacttcctgacctcttctgtctttgagggacagagaccaagctagatcctttttctcacctttctgcctttggaacacatgaagatcatctcgtctatggatcatgttgacaaactaagttttttttatttttcccattgaactcctagttggcaattttgcacattcatacaaaaaaatttttaatgaaatgatttcattgattcatgatggatggcagaaactgctgagacctatttccctttcttggggagagaataagtgacagctgattaaaggcagagacacaggactgctttcaggctcctggtttattctctgatagactgagctccttccaccagaaggcactgcctgcaggaagaagatgatctgatggccgtgggtgtctgggaagctcttcgtggcctcaatgccctcctttatcctcatctttcttctatgcagaacaaaaagctgcatctaataatgttcaatacttaatattctctatttattacttactgcttactcgtaatgatctagtggggaaacatgattcattcacttaaaatactgattaagccatgggcaggtactgactgaagatgcaatccaaccaaagccattacattttttgagttagatgggactctctggatagttgaacctcttcactttataaaaaaggaaagagagaaaatcactgctgtatactaaatacctcacagattagatgaaaagatggttgtaagctttgggaattaaaaacaaacaaatacattttagtaaatatatatttttaaatagtct

SEQ ID NO: 16248 - DNA, 4018 bp, Homo sapiens
catcaaactctatggcgtggccttatcgattgcagtgggaagttgttgaagacttgaagacgtgattcctgctccaatcatcccttcttgctcctctttgtgcacgtacacacacacacacacacacacacacacacacccctgctcaacagaggtttagtttacagtctctgaactaaagtagtaacctcccaaattgttttttctaataagctgagattcccatttctcttaaggagaagccacccatgagatgtcttttccttctccatcatcttagagccaagttatatgttcttgtctaatccatgtagctttttgttcaatgacttgatcatctgcttcctttttgaatttttaacagatagtaagtaaatttggtggttttttcccctgggtcagtgatggaaaggggttaacttcagccaggattgatggcagctgagggaaattcttgcccaactaaacccagaactcaaacttaacattagaaaataaggtccagggccggacacagtggcccatgcctgtaatcccagcactttggggggccaaggcaggctggatcacctgaggacaggagttcgagaccagtctggccaacatggggaaaccccgtctctactaaaaatacaaaaattagccgggcatggtggtgggcgcctgtaatcccagctactcagaaggctgaggcaggagaatcacttgaacctaggaggcggaggttgcagtgagccaagatggcgccattgcactccagcctgggtgacaagagtgaaactccatctcaaaaaaaaagaaaagaaggtccagcttttggattcaatgagtgggaaatacattgtgcctttctctagatgtgatacgttataccaaaatctttgtagtgtgcagagcggtggtttgagactaaatacaggcttagaacttgcagagtgtgtattcttggatggctgatgcatcgacttgcattcccacttaacactttgattagcatgaacttgccaatcaaaaaatgacaatcaatttgagaaaatagaaatagatatttttaaataaaaccattcacagtttactttgtcttgataccttggtttgtcccagctgaagtgaagcaagagagtttgaattaatttttccattataatgttttcgcatgtctgcctctaaaactgtgattttcaagctttagcgtgcatcagaatcacctgtagggcttgttaaaacactaattgctgggcctcaacccaaaagcccccaaagtggcacttctgagttcctgctgatgttacaagggaccacacttttgagaatctgtgctttaagctaaggaaatattgcctggtgggttggctgcctggtattgggcatggaaatttgaattgctgattggtagatggtgtgtctggacttaactcacgtagtaaatactgctgatcaatacctaatcattccacatttattgagctccacctgtgtgtatgtgtacccaagcacacatgtgtgaagggctatagccaaagtatttttactagcctgtatgaaatcactagtccttatttttaaaggtctatggtttcttggaagtagtttgattgttgagagagacctttgatctgcagtgtaaatctaccagtcatgggccagaagggcaaaagcccagctttctctttggaaagactcaggctgtggtttgttgatggccaggttttcctcaggctccaacaactgtgcttataccaagcagatcctcatcctccatataatcatctttgttattcgtgggggtttaattacattacaagtggccaaaacccctgttctcagtgaagaaccacattggatttgtattctgttcagttgtagtctacactgcagtcttattcctggttcaaactacctctttaaattgatttgtcttgtgctggtctgttaaatcctgccctccttggtgctagatccagttgtgcctcagggcagaggaaacaaaacacagctatcctgttggcctgtgttgtggttttgaagtttgtactttctctgtgggtgccagttaaatattggagagcaaggaatgtggacttgtatggctttgaaccaagagagggttatgagcctactggattgaggttaaaatccaagaaccaacatttagagctttgtgcttttctctcattccatcactttgtaatgatgatacttaacatgagcagggtgaatgacaggtactgacgaagtccaacacaaaggtataatacagcctgttgtctaaagccaaggagtcataaaaccatgagaaataaataggaatcaatagttagtagtgacattggtgctctctagaaatctcagcatgagctgctatagaataccctcccagcaacaaaacctaatcagtaaggccagctagacccaatggctcatgcctgtaatcccaacactttgggaggccaaggtgggaggatggcttgtgtccagaagttcgagaccagcctggacaacatagtgagatcctatctctataaaaaatcaaaaattagccaggcatggtggtgcatacctatagtcctggctatttgggaggctgaggcaggaggattgctttagccctggaggtcgaggctgcagtaagccatgattgcgccactgcactcagcccgggtgacaaagcaagaccctgtctcagaaaaaaagaaaattcaaggccagttaagacaaaatgctatgactttgaaattcacagaaagaaataacagtttagattaggtcttcaggtattcaggatagagataatctcctgaaaaacctgaatttcagagattcttagactggctgccaaaggatgaagctagtgaaggagaaaaagcttaaattccatcttgagctcttggattgtgataatacaatgatttcattaacttttcatttctgtatacctgttcatttggaatttaatgcttgacttctttgttcattttggatctaaacttctcttttcttccttccccattcacatctattagaagactgcatcaccatttctttggcccccttactctgttgtcctttcccttttctttcagtttttttaatcgcatgtctagtatattaagtctccatagccctcctgatgcagtagacagtgctatgctgtggatataataccaaccagaaattggcatttataaacctgttaagagactttaagcatgcttcaagaggcagttgacccactggaatttctataaggctggtacccttcccagagttacagaatcttaggtgccgtctctagtctgtgagggaggaactcccagcatccccattgcccacaaatggaatcctcactgtatccactaggagattagaaattaaggtttcttcactacttctatggtagggttgtctgaaattccctttcaggctgtgggtactggtcttgggttctagtcataaggggttccttataaggagcaggcggaggggagtacactttcatgtgatttaattttgatcctgccctctccagctgctccttcaaaagatacatcaaaagatagaaactctgggctgggcacagtggctcacacactttgggaggccaagcgggggtgcagatcacctgaggtcaggagtttgagaccagcctggccaatgtggtgaaaccccatctctactaaaaatacaaaaattagctgggcgtggtggtgcatgcctgtaatcccagctactcgggaggctgaggcaggagaatcgcttgaacccaggaggcggaggttgcagtgagccaagatggcgccattgcactccagcctgggcgacaagagcaaaactccgtctcaaaaaaaaaaaaaagatacaaagtctgcatttgatataatgccttaattactgggtctacaattaatgttgactgttttagattgtaagctcctggagagcagtattgctgtagtaggaatgttttaacagtgtcatatgaaaaagaacaaaataaatattttgattttgtgattct

SEQ ID NO: 16249 - DNA, 1114 bp, Homo sapiens
atgacaatgggaaaaggacttgaacctcaagctctctctaaggagctgttttcctcaaacgagaagaattgaagtgtttagttctatcatgttttctgccaattaccatgcatagaccctcagtagaattggatttccatgtcagcccccactccaggaaggcagcccaatccctaggtgatggggaacccctctcacggttgaaaatttattacctttttacgccctgccacgaactgtgtagacattgtttttattaatcttttgtttggccgggcgtggtggctcacgcctgtaatcctagcactttgggaggccgaggtgggtagatcgcttgagctcaggagttcaagacgagcctgggcaacatggcaaatgccgtctctgcaaaaaaatactaaaattagctggtcgcggtggcttctgcctgtgattccggctacttgggaggctgaggtgggagggattgcttaagcctgggaggcagaggttgcagtgagccgagattgcgccattgcactctagcctgtgtgacagagcaagaccctgtctcaaaaaaaaaaaaaatttgttcgaatgccttatagccttcctcacagcacccaggattgtgactgactctgcatttttaattcttgaaacttggctttccataacatggtacatgcttcaggactacatatgacccagagagcaaggtggctgaactatagtctggaagccctcaggtaaagaggcacatctcaccactcattggttaaacaatgcatcatagcgagcacttttcctttccctggagaatgggatgtgaagcagtagaccgcagccacgccgatggttatacagtgaagaagacttcacctcttcctattgagtttgcttggaatgctgacagcatcaggcaactctgaactgaacatttgctttgtcagaaaatatctttttttttactttgaagtttggcaaccttcatgttaccccaaagcaaaaccattgtgtcaggagtcaaacaaatgtttagaaagcaaacatgacgtctctattgtacaacctcctttctcttggctgtttaaaggatgtacttcgtgtattaaagggtactttatgttgaagt

SEQ ID NO: 16250 - DNA, 1091 bp, Homo sapiens
cctctggccacaggaagccaggtccaccgcccaccaccctttcaggccatgtttctactcagtgtgcttttcccaaatgatgtgtgtggtgtttctaagagaaacagggcccataaccagtgggcagctttaggagggatggggatctgtttcagatctaggcataacctgtaaatcacaggtgtccaaacttttggcttccctgggccacatttgaagaagaattttcttgggccacataaaatacactaacgatagctgatgagctaaaaaaaaaaaaaaagtctgtgtataatttttgtgatatctgccaccacagataagcaaaaaagtccttgcattcaaagggttggagattgctgctttgagtgctgggtacctgtggggaacctactactccctgggccttagtctcccaaatccaccatgcatctgcccctctgagggtgtcttcactttgtctctggcatctagcatggtgcctggtgcatagtgagcatgcaataaatatttggcaggtgagtggatggatagatggataggtgaatgtaggtggacaggtgactgggtggatgttgtggtctctggagaagcactgccattcagcctcctgctccagctgttcacatgcagaaatgctctcttcacaggcagagaagcctgtggctaaagtttccacatcccattaactcagtgcttttgtctttttcatgacatggcacatagagaaaatatttttttctagcacacaagagcaacctgaaaggctgctcctggccagaggactctgtcccgggggaccgtgtcctcccccatgtcctgcctaggccctcagaggaccaggggatcatgtctccaggtaacccgactgtagcccctgctggctgagctccagcctgtgcccactgataatagcagggacggccttttctcttagagcagctgataagtttccctacctgatggccccctctgacataaactgcacacctggggtgatggcttaaagccagaaagagctgagggagttaagagggccaaccttagggcacgtgggcattattaaaggtcttaaaagcattgaagattta

SEQ ID NO: 16251 - DNA, 211 bp, Homo sapiens
gaagcctctggaggaatagactgaaggcatcccctggggcagccgtgttccaaagcgggatggctggtatcctgagggcagcaacgtttcacataagggcaagaggagaggggcttctgctctctggagcctttaccagggcctgagctctgagcttagggattccattttctttgttcacctctacttgcctctaaaataaatgtaggag

SEQ ID NO: 16252 - DNA, 784 bp, Homo sapiens
gggccactggagtcgagctcagcgttcacaccaggcgggctgggtcccctgcccacctgcctccctgccccctgtgacggagggggcaagcaagcccccagaggctgtgtctctggacagacggatagacatacggaagcgaggcctggaccaagagaggcccaggctactggaggagtagaaggatgggccccgtggggtccccactgccccggtacgagggggcccaagaccctggcaggtcaggggccctggccaagccagatctggagctgctgctccctgctgcggagaccgcggaggcttcgcgttgaccaagttccttaaagaactggctgatggggcaggaggtccaggcctgggctctcgggccctcctagagggccattggagcttgcagctcagacccccactttgagttttatttatttaaatagtagttggatgcttggcacgtcgtcctgtaataggaaacccttgcctcatcagttttcctgatttacaagtgcaatattttagccaatgccttgggagaagctgccatgcaaaggtggacaccattctccagcttcaggggatatgctcgtcccgggcaccggtggcaggcagctggccttctggactaaggcagcctggggggacactgcagtctggctacacacagagatctggcaccccctgggtggagtgtccctcgggggctttgggaaagcatggcaccctcagaccacacagtagccaagttctggagcaaataaaaggcctgtgttatttcttgttcttg

SEQ ID NO: 16253 - DNA, 662 bp, Homo sapiens
gcaaacccaagggcgggactctgcttctggcaacttaaccctttcttgggcatcccctaccacacagtaacctcacctcaactggacctgaaacagaggaccaagatggtgggtctagggtcatctgaagggagtggtcccaagggtgcatgtggatgtcaacagaaggaccacaatggtgtgagaggccttgtgggcatgcagagactggcagcagaaagtcccaagaggagaggactcagaggcttcttccttccaaggaggaggaggaggaggacattccacatctgggcttccagtggtggctcccggacctgccttgggggcagcaggagaggttgggagaggtcaccctgatgaagaacaatgccatgatctgctgctgccagaggacatctccgcccatccactcattttccacctgtacacattggctcattcattcgatggatatttcgggtgcatctactttatgccaggctctatgctaggagctggggatactgtggagaaaaagtcggatatggtctcgctctcatcaagatttcagtctagctgggagtgagcgttaaataagtcaataccaacacacacacgtgcacacacgtgatggcaagctgtgatcatctatgaaagaaaaaacacagatttctttaagaggg

SEQ ID NO: 16254 - DNA, 6428 bp, Homo sapiens
gacttgacttcgggggaaaaaaaaagaaaaagagaagataacattagaaaaaaaccacacaacactgtcacaaagaaaaggaatttaagttctaaacactgtggacctcattataaatgccccctggaaacttaagtgctttttttatatgtgtgtgtgtgcgtgtatgtacacagccacacgtgtgtgcacgtgtctgaacacgtgctgtggttgtgggggtgtgggggggtctctgtgctcatctccatggccagagaaactttgcacacacgcacacacacacacacacacacacacacacacacgaccctggtgcgtgtacatacgcctgtgcttggacgggtgtgcattgaactgggcgtgtcaggaaagctgagcgattgggaaagagggagatgtttcacctccttttctcagtaagggggctttagaagactccgctttcaggtgtgcagattggcagaaagctgatgttgtgaaatgttcaggcagctgagatctgaagtgacttgacgctctctgtccttcaccccggtcctccttttccctctttgaccctcttccagccctcctaccctcctgatcccattgtgcacccccccacacactcggctgctctgctgtggactctccacactgcatcagatggacggtttctgcactggactttgtttcttgttcaccttcagggcattgagctgctgcctttgagataccccttgggtgtcccggggcagccgccttagaaacacacctatctatctccccaaatcaggaaaggagacttaaagagtataaagctgacattttgctttttaatataagagaggagaaaaagacatttttcagagaagtatagatactgtctccactccctaataatttctctccctaacattttagcaatttttaccttgtttgggggttcattttgtttcttcagatttgatttagactctgctaggaggcactgaatgtctataacttatgttttggagttttgtttttttacttgccccttttgttcctcaagtcacactgtaaactagctcatctctgtggtgtactcagtatcctacagtctttcttggccttccctgtacagttcagttttcacatattcgaacggccaagaccaggttcttggctgtgctatttggagaccaggcgttggggaggattcacgggttccacagctgcggggtttggtggccgtaggggaagcagtggtttgggagttctgaatgtaagcgccagagctgccctcctggtccgctgtgcgtggtacccagtgtgcatcacactactcaccccctcccggaccctggcagtccacagcgactccgaagtcagcccatagtcacatccaccacacctcagacctgccacagcctctcctcacttcccaggaccctgaggcttccaggagctctgctgcccacagccctcggggtcctcactcacacctccgacttccaggacggcagtgagcatggtgccttgtggccccaacagttgatgttccgagggtgggatggtgtttggccatgttcgactcgatgctgtgaaagatgtcttcaggcttttctctcctgttcccccagctgtgagcaaattaggttctacacacacagttcggatgccaagggtgacaccccattcccttcacaagaggcggttctgtcacaaatcagcactccacccccaccacacctctcagtgaatgaagtgctggtggtctcactcccctggtgacccttagccgtgggatggggtggttacactaaggcttcaagctgagaatggccatcatggcgggaggctgtttgcaaaggcaccttctgtcatcctggggttggctaagtcaactccaccccttcccaataataaagcatcactcaactgtgagatacctcgactacaaaaagcactgtaccacagccctctccccctgggtccatgacaggagcagggagtaaagttgattgcaaacctcatgaaggcttaggatcatggacctggaacatagtgtttgggggccaagcctgcacactttgcctcatgagaactcacccagctctccccttgaaacttggacacactgaaatggatcaaagtgggccatttccacatttgctccagcaaactgtggtctcaggaactaccatgccatttcctctcctggagaagttctaggtattacctccacaacatttccaactgggggactgagcccacttatcagagaagagccgccatccacactggagcaggaacagggagaaatccagacaggaacctcatgtcacttcctagggaatatgggaagaaacatcagcagactttatgatgtcagttgggcctttggaggcattctggaaggtggcctcagcatcactgatgattgacagatgctacagcaaaaggtccctctagcgttgcttgactgctggggaagggacagtgaccggcactttgacccacacaaggataggagctgcctactttgtgtggtaggtgagagcagagcctgggagcccatcctccctctacttggagcaaagttgtgctggtgatgccccattattgggccagttgattagaaaataggcatttcactttcttggaaagccatcggactaagcccagatgtgcatttagagcactcagcattcttctctttgaagcatgggatgtctgtcctccaggaagagatttgatcttaggttgttacctccctttcacttcttttccacctcaattcaatacttaggggttggcttgcctctgcaggtttgatgtgaatgccactgggtactcagaaagctgtcctctggggctgccttgtccagttagataacaagatagcagatgattgtttcttgcaacctctggttccctccggaaactggtgtcaccaacaggaaaggctgtaccaaggtgccctcttctcagacaggctgttctcagagtgcaaatcctgctgcaactaacagcttaataaaacccaaagatctcacaggtccagccactggcccctttatctccaacaatatccacctcaccaaattctagttcagccaaaggattgagacaggctcttccagttcatctcctggtgtccagcctgaccttcacatctggaaggattttgtcgtctgcctcccagttctgggtccactgtaggtctttccatcacaagcctttgggggatctgggaccaggaatttgggccgtttctaccatattctcagcagcctaaggtggtggcctgctgatgtggagactactcaccttgagccatgtggtccccaggacagaaatggcctttgttttgacatacatggacccaaaaggggaggtgaagaaaacacacctccacctggcaagtttttctccctcatctgaggtcagttgcttcaccaacaaagcccaagccaagaactgcagcgttgagggttgtccctcggagtggagtagcccaaggaatctcaggtccaccaagagcattggtaccatctgggccacgggtggatgcctttgttctggcacagttctccacttcccgattcctggctcagccagccaggcctccctctaatggcatttagtaaccaggaaacaaaacacatgccacctgagcaaaactgcctgcacttcatctctggaggttcgctgcacagaggccacctgccgcatcaccagtgaggaagctttgccaccatcctgcttggcagcttcacacttgacatctgaggattggtttttggctggaaaaagggtaccagggtttcctggcaaggacaggagagcagtgcagtgacacagatgagaagctgtgagtctccaggattcaaggaagccaccaggtgtgcaggctgggaagagacatctctttcagtttgaccctttatctcctgcacttttaaagaaacaccagagaaaaaatctacaaggcgtgtttccactgaagctgaacctctgcctttaggagtcccctatatttgagcaaggccacctgcttcccctggacttgagctggactccttgaagagtgggcttctggagagatgttaggaatatagcacatgctctctgggggccacagggtcattgggaaggtttgaaatgaagatgggatgtggctggaacagcctgtgagatggctccattggggacactcccctcatcttgtcatcacgatggatatgctggaagaggaggtgtcccagtgagccgcccgaagttcatagctttgccctcgccttggcaacagcggcaatgcctctatctctgggatgcatcttaaggagggctcctaacaaggccgatgatttagacagaacaagagactaagtaaggtccggctatcccgtggagccagtagtaggtgggagctcctgtccccgccagccctgctccagcccccgtgtccagctgggccagtggaagaactgggaaggaggaagcccctccctttcactgtggctaatgtttgctaggccagttatggtgaaccaatgatacagtgttttccctcttaacgttcccctcctggttttgccttttcagggttttctgggggattttgttgtagtagttgcttttcttcctctctcatttgggtttgaggattgtggtcgggggagccctggctttcaccaaaggagcccagtggtttctgtggaagaggcgcccactcccactttaatgagggtgaagattgtcaggtcactgtttgacatattcatgccccgtcccttccccccccacccccccgcccacccaccacgggtgtcgctttaaagagtcaattcttgtacagagaaggatttgctaggtttgcatttgggtgttagcatcacgacccacgagggccctgcccaaccgtgcgtcccatggggcaccttgactcttcaaaccaaaattccttaaaggggcacagcccagccttgtccgcaacctcaggggcctgggattcctgtggcgcttcctgaattccaggttggcacagatgatgaggtctgagaccagccggaaggaggggctcctgccataacccaggtgccagccggtctccgcctaggaccttccctcccgcccagccagggtgggcggcatcctacgcggtgaaacgagctcatggactgacccggggctgggcctcgccagccaggagagagcgagggccgcacggcagggctggcccaggcagctcgtccagggccattcagatcccaagcatcaggaaatcattttgtacaaccacccgaagcagagatattttttaagaagcgtaaattattttcagttgttttctgatcctgcctttttcttttccccacaacttcacgccagtgagtcgttcacatcaggtaaatcttgagaaagccttggtgccctcctccccaccccccactcagtaaccacgtgcgtgcacccccgcatcctttctcagtagttaagacgttctaggcaataccatagacacatctgactgtgtctctctctttgagtgcaagaaactcaagtcatcttaaaaaaaaaaaaatacaaaaaaaatttacaaaaaaacaaacacaaaaaaaatatcttttttaggccagagttttctacaggtattaatgaatatttttcttaatccttataagttttatgtgtttaatatttcttaataccggtagcattaatttatacttttgtagcaacacaatatttttataaacagccggtgcttggctcaagtcttcacgaggggtttaggcagggccatcttggggaccctgtgtaccatgtactgtatttaaaaaaaaaaaaagttacctattgtcacacttgctgtgttaattaacaaaagatgttgtgtgcggtctcctgtatcggtgtggatccaacagctctccagggagtcacattgcatgggggttgagttgacggttcttgtgatatgtaaacccccgagaccaaacttgagggtttatttagggttttctgtttgtcctttgggtttttgtttcactttgttttggtgccgtttctccatttacagccaaatcagtttcatgatgttcaaaacatttactgatgtcaaatggaggaaaggaacagaaaaaaagatttttacaaagtaataaaatttaaaactgagctgtttaatgttgctgtttttacctgtctgttcttgtccaaaagtggaacattcccagggagaagaggaaggttccactcggttctttaagtcgccaaaagccccagcccgggattcagtacctcccctgccccccgaattcttgcagcactatttcccagttggttgatgccaaggcaaaaagataacttttaacagttagagaggatcagttgcttaaatgatttcatgtcagtgttgtatttatggttttacaataaaacaacctttaggaaga

SEQ ID NO: 16255 - DNA, 120 bp, Homo sapiens
caggacacagccttggatcaggacagagacttgggggccatcctgcccctccaacccgacatgtgtacctcagctttttccctcacttgcatcaataaagcttctgtgtttggaacagct

SEQ ID NO: 16256 - DNA, 120 bp, Homo sapiens; identical to SEQ ID NO: 16255

SEQ ID NO: 16257 - DNA, 1128 bp, Homo sapiens
aagagagaagcacctgtgctgtggagtggcattttagatgccctcacgaatatgaagcttagcacagctctagttacattcttatgatatggcattaaattatttccatatattatataataggtccttccactttttggagagtagcaaatctagcttttttgtacagacttagaaattatctaaagatttcatctttttacctcatatttcttaggaatttaatggttatatgttgtctttttttcctatgtcttttggctcaagcaacatgtatatcagtgttgactttttctttcttagatctagtttaaaaaaaaaaaaaaccacataacaattctttgaagaaaggaagggattaaataatttttttccctaacactttcttgaaggtcaggggctttatctatgaaaaagtagtaaatagttctttgtaacctgtgtgaagcagcagccagccttaaagtagtccattcttgctaatggttagaacagtgaatactagtggaattgtttgggctgcttttagtttctcttaatcaaaattactagatgatagaattcaagaacttgttacatgtattacttggtgtatcgataatcatttaaaagtaaagactctgtcatgcatttttccccattcttttttttttccctgtctccgtgacaaccagtggttcttcatttttgatcatgcgaaatgcattttgacccagatggtctgcagaacttcacttaggacattagcacacaaatagcacacatatcacatacccatttatatacataattagaaaatgttcctgatacatgtgtcatgtgatttcttccaacaaatgttttggaaaacagcaagcaactagtctgtaggttgtcttttctctagagatccttgtcctgggacagcctggggcaagttattaagcatatttccttcctggtgggctagatgatgtgcattatacctgtagtaccttcatactagcccttacaagttaaatgtcctgtggccatcttagccgaaagtctttggttgcaaaatcttataggtaaaaacagttgaaagaacattatgggatttccttgcttgttctgatacaatacaactagatgaccttaaaaaccctc

SEQ ID NO: 16258 - DNA, 2371 bp, Homo sapiens
cctagggatgaaggtactcatcttccttcaagactgagcagtcaggaaggcttcaggagcccaagatggccaatggggagccccaggtgaggagagaagcatctgggggcactccaaaaggggcctgtgatgtcagccactggggtgttgtgctcacttcagggcccagcacaaaaatccttgtttgacatctcatgctgaccccctggcctttgcagaagctgatggttacagagctagtcccaccaaagctactctctctgctgcttagaactgtggacacgtatggaaagactggacccccattgctttcattgttcagagaacccaggagacatgaagatgaccagactgggcaaattatgtgtccaaaacttggcctcagatgatgtttccatctccaaccccttcatgccagatggggaaactgaggctcagagaggatactgctctatgtggcattgccttgaacccctaaaattatcagacttcctttttccaatataaagaaaaaaagtaagttttcagaattctctcaatttttaagtttttctcccccatattttgtgaaaagcagtggtatgtgtacgtgttgtctaccagtacacaggctgcagaagacagagacagaagaaagagatcaagggcagataactgttgataggaatatttgagaaagattgatcctgtttgacttgaggacttattttgttcacaggcatgcacgcttgtggttgtggttttatattacagatgtagaacaatggttatgtttcccgacatgaacattgtcctggaatgaagtgtgatcagccacttgtggaattctttgaagagctcagaggcttccaagtgatctgctcctgaacaagtttgaagacctattgtttcatagacccaagaccaaacgcatctaaaggatccccagcccccaagacctagcctttgtctgcgattttggcttcatctcccacaaaacccctttatgagttcacgctctttcctggactgacatacctattcctttccatttgttggactcctattcatgcttcaaagtccagctttcttaagcccttctttaggaagccttcccacacagccaaccctgctgctctctgcctcctttaaattcttgatacagctgctgcttgttctgatgttttatggtattgattctgttttcctgtgtatatgccagtttttctagctagactgtaaactccttaaggacagagactacaccttgtactttttgtgcatgacctggacctgctaaggaaaaaaaaatcttgtggattgattgctttgccatccccacagcagcttttgcaaattgctttccaaactcacttgaatgatgacattgctgtggacctgggttctggacctgatctgccacttcaagctgtgtaatttttggcaagttgctttctttgcctggtcctcagtttgcccatcaatataatgggtggattggatgatttttttttttttaattgagatggagtcttgcactgtcacccaggctggagtgcagtggcgcgatcttggctcactgcaacccccgccacctaggttcaagtgattctcatgcctcagcctcccaagtagctgggactacaggtgtgcaccactactcctggatatttttttgtgtttttagtagagatggggtttcgccatgttggccaagctggtcttgaactcctgacctcaggtgatccacccgcctcgggctcccaaagtgctgggattacagacgtgaggcaccacaaccagcctggatgattcttaagggcccttctaggaccaaagttctgggaatttctagcttattctgccccctcatagcccttggcctatctatctttatccacatgcagaaacatctggcaaccccacatggctgagatgacctggtcctaggacacccttggacagaagactggcctacctagcagacctggatttttcttcctgatctgctgcttccaagttgtgtgaccttggctaagtcacttaacctttctgattgtcatttcgctttttaataaagtgggtctggtgaacaagaaatgtaataaacacgtggcttgccattcaagagatgagtctgaccattcactttctgtgtgccagagaagagagatcatgggtatagaccagcccctggaaaggctgctttggtcaaggctgagagcagctttgctcaaggaaattattcacgaaggtgaccactgtctttctgacctggcacagaggaaatgttggctgtgaatgtgaccaatagaaagaagcccgtatttctcagtcagtcctagaaccccggtaagtaattaacagagaataaaaatgtgtttgttaaatg

SEQ ID NO: 16259 - DNA, 519 bp, Homo sapiens
atgtaagtgacttggaaaaggaagaggagttgccagaaacagctaaaatgtcagtagaagacttgacagcttgagaatagaggaaaaaataaaagcgaagcagacaaaaagaaccttacctcccccacaatacaacattgggctgctgaacccacaaaaatctaaatccgtttagaatcatctatttaactcctcagagacatgcacaaactattctagagaggcttgtgcctacgaagattacttaagaatgtgttgacacatttggagggggttaatttaccagttatcatttactagaaaggctttttctataagaatatatgaaagagtttcctcggagcattcaaccgggcttctttgtagggtatgtgtactgcttggagctacggaagaccacgtcctagaagtgctgtgtccctgaggcacacctatgtgtgttatctctctggcatactttccaacaaggattcttttctagtctatacattctgattaatttgcagtcagaggcaatgc

SEQ ID NO: 16260 - DNA, 5704 bp, Homo sapiens
ggaaggacaagaagttgtcaaagaattcccaacgccaggacccacatccctttggtattgatttcacagtcagctgctcaacggaatggcctctccacaccagggatccttagcacccaaccggtctgcctttaattttacccaggaaggactcacattggggcgaatgaaccaagtttcgccatgctggatgatgaaatggattcccatcccaaagtctgagatggattgcatatacagtgtgcagtcccagagcctcctaaaattctagccatttgtcacacaaccacagcaagaaacgtgttctatatctagagtgtgcccatctgtgtttagtacacatgcatgcatacacacccatacaaacatctgtgtgagggcagttctggagatgagcagagagagaccggaataaactcaatcttttctttcccaagctcctagccaacactatccttgggagaaagaaatttgcagaaactgctaagaccaagtgtggagatgtcaagctagttcacactctgaggctcagaatatgtaggacatgcacaattgtgcagtcctttgggattggaagtgaaacagtctgtgatcccctaccttctagggaactaggacctaggaagaggtaaagattatcaggtatgcaaagcgccccaattcttctgctgccatgggggattttaccccaactccagggttcgaggccaatctgagaatggcttaggattgcaatgtcaaggtattatatcagccccttgcttgaggcttgaggtcataatatccctctaggacttacctgttcccccagatcttgccttgggaccacatttgctgctacttttcctgctgctctatcctatacattgaataatccaagatggtagaactaggttaggaaaaattccacacaaccaaacagtctgccttaaaagtgacccacatttttccatagctcctcactttttagcccttctgcaagagaaaaaccctcatgggtccacatggtgagaagttaagtttcctgtaagtgggcctctcaccctggaaaggagttgagggacatcagatgctggaaccctcactgaaagtccagaatgtctaagccagtgttagattttgtaaacaagtggaacagtgttaaatttctatgatgttggagccatccagagactactggaattgtcgagacttttggattattatccttatccttatcctaatcttcctagcccttcaggctagagtaggctttgatcctgagaaccttgctgttgctctgaggagatataattctgggagaaagaatcttttataagaacagtacagattgttctcaagagggccatcagaaggaagccaaagagttcacagcctcagcaccaacaactcaacatggtcatcatgttttctatatggtttttccagctagcagtactcccttccatacctgtgactgggcagtgcttttctctctcccatgtctagcctccaaaagttaagtgaaaattagtcaactgcacgtggaagcccccaccactttggggatctctttatttcttttcagccagggacctgtccactccctttgaattaatatgggaagaaattaatacaggatgaactggagagaagggttgagtgtggcatactttctgaaacctggagctgggaattgcggagaagggaaggtctagactagttacatcacatagggattactgtaaatcaagtcatctcaagtctagtgaagacagccaacagaaacaaaacctagcatagggatagaaaataccatgcacgtgtgcagccccacctaattcctgcatccaaggcaggtgttgttaatctatcatagcacttaaaaaaaaaaaaaaaaagagaccaaaaataactttaggaaccaccatattatatcactcccaatagcactgacctggtgatcaaaaacacttgagaagacatctattggccatctctggccaattacactaagaaacatatcaaggtgcttttggcacaggtgcccacaaatacggatgcagtgctgagatagtttatgagacttgtaccatttcacaaactctgaaattgggttccatattggcaaggctgccacagttgttaagaataatcctctatgtttcttcctcacaaaaccatatctcatttatatccagaccattacttcactataattacaaggacaaattattagcaagaaataagaatagtattagaagaattgatcctattttgaacccctctccagtatcttcacactcttgtcaactctccaggcctctctcttgccctgagttatcagcctgtgtggtgttaactaccttagaaggtacaagctaagaaatgtaacagtatcaaccctcccagttgcttaattatacccataggtaatacaaaaagctctgaagacccaaagatgacattactaatgatgtgatttcaggagccacagaagaaccttaccagcttccctcaaatcagtccttatcctctttctatcttcactcccatcatcatctattttcacactatccagctaagcaaagattcctggaggctgacttgtatcttcagactcacagagtgaattcagctcttctgaatcaagacccacccagtctctttcattcagacctgttgctaacaaatttatatttgccaaggatattaggcaaaagaggctacttgattggtggccaacctcgtgcccacatggaaggtatctttaatagggtcttttcaaaccttagtggaggagggtcagctcaatttgggcaatgcatttgttcccagtttcattttcttcctgggaattaactcgtcatttcattccttcagtcatcttctgtgtaggtgaccggagcactgagaggcagctctgatgcactattgtgtgtcagcagctcaaaggccctaaaacactgaaggttctgcatctgaagtattagattgttagcagcaaaatatgaaagatgaggtggacagtcctctaagccctatttagggaagcttttccaagccacaatcttaactacctacccaaaggatttgcattacccccagattctgtgccaacaaccttttaaggaaatacagtccttgggaaatgagttttgatggtgaattggggtgttaaggaagggaaagattgtcatagatggtagggctttgaaaatgcagggtatcagctgccactcctggcttcaacacattgagtcactgcctagacggttctcttggtcttattcccatcctggccaatgcttaaatactatttgttgaaaataattctttgagacagatttcagctacctcccttccaggttcgatttaacttggttgtaattgtcaatttgttgttataggtcttacctgtgtgaaagaaagaaaaagaaagaaagaaagaaagagaaaggaaattataaggtcaagttaacagttttgaggttttgtgtttttttctggaactacttcaagtgagaaaataaaaaaaaatggtgacaaagctgtacagatagagataatagaagacaaagagattaaaaggaaataaaaatgcatgattaaaaactaagaataaaaaacctatttttatgtttcctaaaggaaattgtttattctacagcctcagtaggtagacacaaacataaagatttccctagaagacatagagtgggatttgataacactgtctgttattttctgtacattgtggtaggtccaggaaatatgacattttcccccttgatgtgttattgttgttgttgggtggggtgggcattttgtttatttgtttggtggcaatcagtggtagtagggagtgggagggcttatattggtttttccagctattaaggggacatattgtgtcgttgtgcttttcacgttataaaatgtttatatttaccagtacagcactgggctttataaagactgcactcagaaccacactgcacagtccagttttttaaaaagctgctacatgacagacaggtaatcccactgagtgagttttgagaaacaaatcaaacgaagtaaacaagaaacataaaaaccaaatagcaaatgaataaaagcctgttcttgtaacttattcaacttttgccaaattcctaccaatcacttgctttttaaaagaaatgtataatagccaaaagagaaattatgtccctgttgtacagaagttagaatttttgactccaggcagcagtttgctcagtgatcttgaacaagttatccaattgcctctacatttgcatcagtttctctagctgcaaaatggggataatactatatacctacctcacagtgggagggcaggagattttgaggccctgaggttttaggtgggctgtgagggccaacgcttgacacaaagtccatgggttattattcaagaatgcacaggcccatcggccttttagaaagacaagacagggagtgcttgtttgatatttcaaggaataaagccggagctcctgaattgtagtccaccttaaaagagagacctgtattggagaatattttatttttttggcaaatttgatcttaccctttaccagttctataatttggttaaaagctgattatgtcctacaatgtcaaagtcagctaactgtcgtctacttaagacttctggtcatttccaacttatagaggaagggagtctctaaaatctcttcttcagaaggcacctcacttctcagacttaaaattccacatcaagtgttccattaaaagaagataaggcattctgagtgcaaacaaatgggggcttcttaaactacacaccagcagtcagtgaggaaaactttgaacaattattgagttgctttcttgggtctctataatcaataacctgtctgcagatatctatctatataaagatattatatataaatataaatttacatatatatgcacatgtatatatagttgtacatatatgtgtgtatatatatacttaaatgtaatatttacaaaataaaactgtgatctcgtctagagaaaatgtattcatattacaaactgctcttccatatttatgtaccatattatacctttttattattgttataattattatgggtatttctaattaatatgatgttgaaacctgtttggcaccttctggaagctaccaaaaaaatgacactccattgaagtgcttaaaagctgttctcataagaattcttctggcctattgtaaaaaagaaaaaaaaaaagaaaaagaagaaagacacaaagaaaataatctaaacaccaaaaactaaacacaattccaatcctttttctgtacctcacgcgcataaatttgctgctcctatttttttttctgtttatgtgtttttatggatctaagttaaatcttttggcaatatataaaaatgtaaatagtaaactttatttattaagaatgtcatcttttttaatttatatttacacaattgttcatctaatttattttttctatacagttttaaatactcagacatattttgctgttcatgatatttttatcctgttctcatggatttgttttcccatactgttttctctgatctcaattacaggttggatctcacaaataataatgtcagagacagaaatattttgccactgttgattactatactttaaagttctatattatgaaaatatataatagcttgtacgcttc

SEQ ID NO: 16261 - DNA, 1596 bp, Homo sapiens
gggatgagaaattatcagtttcttctgctcccaagccaacttcccttcccttagttcttggttgttagtggcacatgcagaatagactcagcctatgtcctgattccagctgggtagttctagaacttcagaagctccatcttttaatgtttttatttgttatgtccccctccccgcttcccacctaaatttagagctttaaaagatgcactgcccaaataggacacacgatggtgttagctgaagtttgattagcaattaggcacttccaaggctttagtagagagagccactttagccctttgtgccatgtttgaaatttgcccttgtattaaatccttgattttttcccatttggctttgatgcccttgatccattgtttccttcctactataatgtgcttcatctgtgacactttctcttgaactctgattggattcactgtgcatgcttcagtgggatctgctccacctttcagtgacatttaagacatcatattcccgtaacattatgtctcagtctgatcgtctttaccagtatgaaagtcattcatttagtgctaccaaaggggatacacaagccctttaggaagcagtacctctcgcctggaggatctgtgccatcttggattgagaattgcagatgtgacagaatggattgaccctagttggttggtattgatgacttcagcctggaaattgcttgccttttaaagaagcatatatgggttggaattatgccaaagcataggaagctgggaataagcaaacaaatgctgatatagtcagcaaatttggatagtctctagggctcatcatttttcatactacctctctcttctggcctgtgtctaaggaattgtacaacataggccagggccaacaaagtggagaggtggacacattttcatgttcattactaaaacaaacagcaaaactattggtttgttattctgtgttttcctcaagtcagtacatactatttggtttcaggatttctttccatttctctatcaagcattaaataattgagaactgtttcttcatctctggtgttcatgtcttttaattaaatacggaattttggagatgataagagggataacctgcgctatgccattttgcttccttatctcactgtgttctttcagagtgtagatatctacccaggtcaaaattcagccaaaagcactattatgtaaagataataatccaaatctttctcccaaatacatgtgtacagaatcatcccccaaggtttagagtcaccaataccctattctgagcttctgctgtatgttttatgtttataattacagttcacaaaaaggaagttagtcttgtttttaagatcagaagtgggtgagaggacctgtgatgaggttcctgagggtttggtgtttactaagtaatatatcttactctaggtgcagggctgatggcaagccaaagagcaactgccttactttgatgtaaacaaaatttgctaaactgagctgctcaaaattgtttttatggtagtagtgtttctttggattgtatcataatagctgccaaaggataggtaaagaggtcattaaaatgatgttgaactag

SEQ ID NO: 16262 - DNA, 2838 bp, Homo sapiens
agaggaaaaataaaaacctcctgaggcatttcttgcccagctgggtccaacacttgttcagttaataagtattaaatgctgccacatgtcaggccttatgctaagggtgagtaattccatggtgcactagatatgcagggctgctaatctcaaggagcttccagtgcagagggaataaatgctagactaaaatacagagtcttccaggtgggcatttcaaccaactcagtcaaggaacccatgacaaagaaagtcatttcaactcttacctcatcaagttgaataaagacagagaaaacagaaagagacattgttcttttcctgagtcttttgaatggaaattgtattatgttatagccatcataaaaccattttggtagttttgactgaactgggtgttcactttttcctttttgattgaatacaatttaaattctacttgatgactgcagtcgtcaaggggctcctgatgcaagatgccccttccattttaagtctgtctccttacagaggttaaagtctagtggctaattcctaaggaaacctgattaacacatgctcacaaccatcctggtcattctcgagcatgttctattttttaactaatcacccctgatatatttttatttttatatatccagttttcatttttttacgtcttgcctataagctaatatcataaataaggttgtttaagacgtgcttcaaatatccatattaaccactatttttcaaggaagtatggaaaagtacactctgtcactttgtcactcgatgtcattccaaagttattgcctactaagtaatgactgtcatgaaagcagcattgaaataatttgtttaaagggggcactcttttaaacgggaagaaaatttccgcttcctggtcttatcatggacaatttgggctagaggcaggaaggaagtgggatgacctcaggaggtcaccttttcttgattccagaaacatatgggctgataaacccggggtgacctcatgaaatgagttgcagcagaagtttatttttttcagaacaagtgatgtttgatggacctctgaatctctttagggagacacagatggctgggatccctcccctgtacccttctcactgccaggagaactacgtgtgaaggtattcaaggcagggagtatacattgctgtttcctgttgggcaatgctccttgaccacattttgggaagagtggatgttatcattgagaaaacaatgtgtctggaattaatggggttcttataaagaaggttcccagaaaagaatgttcatccagcctcctcagaaacagaacattcaagaaaaggacaatcaggatgtcatcagggaaatgaaaataaaaaccacaatgagatatcaccttataccaggtagaatggctactataaaaaaatgaagtgtcatcaaggatatagagaaattggaacccttcttcactgctggagggaatggaaaatggtgtagccgttatgaaaaacagtacggaggtttctcaaaaattaaaaatagaactgctatatgatccagcaatctcacttctgtatatatacccaaaataattgaaatcagaatttcaagaaaatatttacactcccatgttcattgtggcactcttcacaatcactgtttccaaagttatggaaacaacccaaatttccattgaaaaataaatggacaaagaaaatgtgcatatacgtacaatgggatattattcagcctaaaaaaagggggaatcctgttatttatgacaacatgaataaacccggaggccattatgctatgtaaaatgagcaagtaacagaaagacaaatactgcctgatttcatttatatgaggttctaaaatagtcaaactcatagaagcagagaatagaacagtggttcctagggaaaaggaggaagggagaaatgaggaaatagggagttgtctaattggtataaaattatagtatgcaagatgaattagctctaaagatcagctgtatagcagagttcgtataatgaacaatactgtattatgcacttaacattttgttaagagggtacctctcatgttaagtgttcttaccatatacatatacacaaggaagcttttggaggtgatggatatatttattaccttgattgtggtgatggtttgacaggtatgtgactatgtctaaactcatcaaattgtatacattaaatatatgcagttttataatatcaattatgtctgaatgaagctataaaaaagaaaagacaacaaaattcagttgtcaaaactggaaatatgaccacagtcagaagtgtttgttactgagtgtttcagagtgtgtttggtttgagcaggtctagggtgattgaacatccctgggtgtgtttccatgtctcatgtactagtgaaagtagatgtgtgcatttgtgcacatatccctatgtatccctatcagggctgtgtgtatttgaaagtgtgtgtgtccgcatgatcatatctgtatagaagagagtgtgattatatttcttgaagaatacatccatttgaaatggatgtctatggctgtttgagatgagttctctactcttgtgcttgtacagtagtctccccttatcccttatgcttggtggatacgttcttagaccccaagtggatctctgagaccgcagatggtaccaaacctcatatatgcaatattttttcctatacataaatacctaagataaagttcatcttctgaattaggcacagtaagagattaacaataactaacaataaaattgaatagttataataatatattgtaataaaagttatgtgaatgtgatctctttctttctctctctc

SEQ ID NO: 16263 - DNA, 422 bp, Homo sapiens
ggaatactgtcttgtgtaaatatattcaaggaaaacacctccactacctcactgacttcataattggaatgtcacatggtttttttaatcaagatgcagtgaactgagattctgaaactccactgtagtttactttgcctgtaccattaatgccaatgtttttataaatcacttgtacatagtacatatgggaatagttgcatatgggaatttaaaccaacatgtggctgagcctttttttttttaatcttcgtaacatgtttaaaaaaaaacagtgattttaactgcatatttgaacctacaaactggtaaatcttattaacaaaaagaatgtacttaaggccctctttatttatagtgtcgagttatttttgaattttgcttaaaatctatttttcatatgaaaataaaagataacaatc

SEQ ID NO: 16264 - DNA, 239 bp, Homo sapiens
ggaggggcagggcccacccatgtcaccggtcagtgccttttggaactgtccttccctcaaagaggccttagagcgagcagagcagctctgctatgagtgtgtgtgtgtgtgtgtgttgtttcttttttttttttttacagtatccaaaaatagccctgcaaaaattcagagtccttgcaaaattgtctaaaatgtcagtgtttgggaaattaaatccaataaaaacattttgaagtgtg

SEQ ID NO: 16265 - DNA, 1983 bp, Homo sapiens
aaacaaaagcccgcttgctcgcttgctggaacacaggggccttttaagttgagcgtgcgcactgcatgggaaatagcggccctggaggatgttagacttgctccctctccaagacagcagcagcctgcacctgccccgtgtgtgtggccggcctcctcctcacccttcccggcccccggccaaggacccaggcgctgcatacaggggaggggcgcaccccacagctggggccggttttcctcagctctaggctgttctgtagcttatctgcccctcccccactttcaagacagatgagcaggagcttgggtctctctcggcccctgtctgttcccagcccctgcagattctgagcaaaggccctgggtaagaagggtgggagtggggcctttgccagcagagccagggcagggcgagctgcaggaatcacccctctgcccctgcagctggaatgtgccacagaggccccacctgaagggtggatgtgctggaggggtggcccagagccatactgcgtccaccctgagctcggggacaggtgacagtggctgctctgggaaggggcttttagatgtaacctacaattcagttaggctagagacagatgctggtggaggaagggctgggccaccagggatcacagaccacaggaagatgggaggtggaagcagaggccctgcccccaccccttcctgtctcactcttctgtcttgtccccacccatgcgccttcgtgcctgagaccagggtggccacacaggcagggcctggctccagtctcatcctcccattgcccagtgagccctgctcttctctccccagccccctcccaccgctgcctcgtagagtgacctcggacagagcccccctagcaatacagggaggctcccggggcctggacaggcgggctcggaggctacccgctgtggccggtgccagctgcccttgcagggtgggtgagctctcaggccgagagccttatttacctagtgcaaaaactgtaaaagtgtacagactcttcacagatttttatcttaattgcaagtctgccgattttgtaaatgttcttggtgtttgactgtaatgtaactatctcacctaatggttgtacatatcctttggtcctggtgctgccgagggctggccgggactgctgctctcccaagggttttattttatttctgaatctagagaacagtattgggcaggaggaaaaggcttggtgtctgcggggggtgtcttccctgcctgtggcatttgtgtgttggctttgcagctgctgtctgagtagtggccactggggtgccttcactgggccagtcaacggggggctcctgcccaggccacagagaacctgagttcccgggagctgggccctgcctgcagccagggctggggttgccagaggccctggagggaaggacagtccctgctggggaagaacagccccggggccccctggtcaccgagactcagcctctgctggagaaagccacgccctccctgctagcacagaggcctgactgacttttttgcttaacttccatgttctgggtgatggaaactgccaaacctcctgtcagtgaggactctttccgactgcccagaaagtgggggtggaggaccgaggctacagctccacacgccccggtcccccagagcatctgccccaggtacacctccccctgcgccccgcacgactgcgggagccagactgtccagggaaacagcctctctcttttctacacactcagccacaaagccccccagctcccacaccgcgtcccagctcccctcttttgtaagtatgtgaaaaggaaaaaatgcaaacgttggagtttgggctggagctcctccctccagctgcgacttttaactatgtaataatgtacagaggaagctgttggtgttctaagactctgtgtggctgtgcaatttctgtacatttgcaattagaaatattaaagatttatttagctatttt

SEQ ID NO: 16266 - DNA, 154 bp, Homo sapiens
cctgcctgaggagggaggaagctacccaaggagagggggactatggtggccaagggcagggtctcggcctggggaggcacccacggttgcagccccagcgcgggtgtcaggaggccgagcctcccctccctgccgctgtccaggaggcggccgc

SEQ ID NO: 16267 - DNA, 151 bp, Homo sapiens
gatgagatcgtgggtcacaggcccgagccgtgaactctgtggctgcctccaccagaggtttccatctgccctactagcattggctgccctgggggacgggctgtagttctagaacctgattttaactcaggaataaagactttctgcggtc

SEQ ID NO: 16268 - DNA, 867 bp, Homo sapiens
agaccaaagaactccttggatgaaagtccactggggccagcaatactccagagcccagtttctgctggatcccatgggtggcacattgggacttctctccctcccccatctacacagaagactgtcaccatgctgacagaagcctgtccttgtaaggcccagccttccaggggaacactcagacatgttcattctcttcctgcttctgctctgggccggtgggtggctctcagaaaatacttgctgctggcaaaaggcctgtactcaggcatttgctttgacttgatgttgccaagggactgaggccattggcaggcttagtaccacctgctcctcatcttaggagtctccttttcaaataattaggctctgttcccattttaaaactctgatattggccttcacctgtgactggacactttactagaggcccattttcactaaacaataaaatctaaataaattggaaggaataacaaccacaaaggaaagaatagagttggtctggattgatgatcactgaggatctgtatgtgaggcacccataacagtagttttgcctgtgagtcgtcttcacacatgctgttttctctgcctggctctctcttcccctccttacctggccagtcctgtttatcatcaggccttgtcttggatatcacgtcctctgggaagtcttcttttcccctctaacctaggaccctcattaccggctctcatagcacagtctactgctttgtacgaattctaagtattcttgttgcacttaattagcctgtatatcctcagaactttgtgtaatgcctggagcatagtaggcagtcatatgttgtatcgtgaataaattgcacatagtagctacccagc

SEQ ID NO: 16269 - DNA, 3158 bp, Homo sapiens
ggggcaggaaagcagcattctggaggggagagctttgtgcttgtcattccagagtgctgaggccagggctgatggtcttaaatgctcattttctggtttggcatggtgagtgttggggttgacatttagaactttaagtctcacccattatctggaatattgtgattctgtttattcttccagaatgctgaactccttgttagcccttcagattgttaggagtggttctcatttggtctgccagaatactgggttcttagttgacaacctagaatgtcagatttctggttgatttgtaacacagtcattctaggatgtggagctactgatgaaatctgctagaaagttagggggttcttattttgcattccagaatcttgactttctgattggtgattcaaagtgttgtgttcctggctgatgatccagaacagtggctcgtatcccaaatctgtcagcatctggctgtctagaatgtggatttgattcattttcctgttcagtgagatatcatagagacggagatcctaaggtccaacaagaatgcattccctgaatctgtgcctgcactgagagggcaaggaagtggggtgttcttcttgggacccccactaagaccctggtctgaggatgtagagagaacaggtgggctgtattcacgccattggttggaagctaccagagctctatccccatccaggtcttgactcatggcagctgtttctcatgaagctaataaaattcgctttctaaagttacctgttatatatctcttttggtcccatcctctaaagcagaggcaacactggaacatggctagcctttcttgtagccatggctgggcgtgctagaggttgcagcatgagactttctgctgggatccttgggcccatcactgtatagacatgctaccactggtacttcctttctccctgcgggccaggcactgcccttttcaggaagctctcttaaaatacccattgccccagacctggaagatataacattcagttcccaccatctgattaaaacaacttcctcccttacagagcatacaacagagggggcacccggggaggagagcacatactgtgttccaatttcacgcttttaattctcatttgttctcacaccaacagtgtgaagtgcgtggtataatctccatttcaaaaccaaggaagcagcctcagagtggtcgagtgacacacctcacgcaggctgagtccagagcttgtgctcctcttgattcctggtttgactcagttccaggcctgatcttgcctgtctggctcagggtcaaagacagaatggtggagtgtagcctccacctgatattcaggctactcattcagtcccaaatatgtattttcctaagtgtttactatgtgccagttcctgtaacaggtgtggggacacagcagtgagtaatcaatacagacaaggttctgcccttatggagctcacactccagtggcagacaaacagaccataaataaggaaacgatgaaataagatatatacaaggtgagtgtgacttcccttctaaccccctctgctctgtcctcccctattgcgctctcaagaccagagacccaacagcagtgatctcagggcagacagccctccactccagctctgagacccttttctcaggacctctgtaggcagcagagagagaggacagaggggtaagatgaggggttgagggaaggttcttcatgatccacactttgggcttagtatttctcaggaagagctatggcccagaaacaacaggggaaactagagttcggtctgacagtccttggggttaagtctcctgtcttatggtccagaaactcctgtttctccttagttggctggaaactgctcccatcattccttctggcctctgctgaatgcagggaatgcaatccttccctgctcttgcagttgctctgacgtagaaagatccttcgggtgctggaagtctccatgaagagcttgtgtcctgtcctttcttgcagattctatttcccctcttctgctaatacctcttactttgcttgagaatcctctcctttcttattaatttcagtcttggtggttctatcaggggtgcattctggccaaggggtgggcctgtgaatcaatcctgggcaatcagacaccctctccttaaaaactggcccgtggagactgagatcactgactctgactcatccccacagctggctctgacaagatggtccatttgttcctgcttccgagatccccagggcagcctggatccctgcccttctcaagactttagcttttccttccatccggtggcctattccaggaattcctcttttgcttaaatcagttggagtttgtgtctgttgcttgtaatcaagcctttatggctgctgggctgagtgacacaagcactttaatggcctggagggacttttaatcagtgaagatgcaatcagacaagtgttttggaaagagcaccctcgagaagggtggatgacagggcagagcaggaaggacaggaagctggcagaacggaggaggctgcagccgtggtccaaccaggagctgatggcagctggggctaggggaagggctttgagggtggaaggatgggatgggttccagaggtattcctctcttaaatgcaagtgcctagattaggtagactttgcttagtattgacaactgcacatgaaagttttgcaaagggaaacaggctaaatgcaccaagaaagcttcttcagagtgaagaatcttaatgcttgtaatttaaacatttgttcctggagttttgatttggtggatgtgatggttggttttatttgtcagtttggttgggctatagcacacagttatttaatcaaacagtaatctaggtgtggctgtgaaggtattttgtagatgtgattaacatctacaatcagttgactttaagtgaaagagattacttaaataatttgggtgagctgcacctgattagttgaaaggcctcaagaacaaacactgcagtttcctggaaaagaagaaactttgcctcaagactatagccatcgactcctgcctgagtttccagcctgctagtctgccctatggatttgaagtttgccaaccccaacaattgtgtgaattaatttctaaaaataaagctatatacagcc

SEQ ID NO: 16270 - DNA, 1204 bp, Homo sapiens
gagcagctgccgcctcccgacaccttcagaaaacacgacaccttttgttgccttctttggccagatgtgtgattctgtgacttgtcccaggaccagaatgtacctaagtcagatccatagacgcatgttggtaggtcactggaccagagcttgtgaagcaggcaacctctggggtaagactactgatactaacaggcctgctagctcagccgacgctctggacactctagaaatcactcctcagtgtgacctcccaggcctcttccccgtgtacgtcaacacctcacccagcctaaaggctgagtttacatgatcagagttaggggatccttcagtctgttgattttttttctaaaccttttttttttaatatacatatatatatatatatatatatatatatatatatatatatatatatatagtgggggtggggcaagggatcagaaattcaaataattcttttctgcttcaatgccagcagaaggtcccccaggtagacatggagaagcactttgttttaaataggagggtttcatagttgcatctgaagccacctggttctgttaaactgtatggtgcaggttttgggtttggcattattcatgtttctgatcaattctatgcaactctcatagttcctgttactttttagcattagctgccaaatgacttcaaaaggctggggtgggtgacttgactgtgagactggattataacatggacaaatcttattttgcttaatgtgtttgtgtgtgtgtgtgtgtgtgtgtgtgtgtgtgtatgtatatatatatataaatatctttcccaatatgccccgttgacagtgtttaaattccagactaggactgctgatctgcacaatttaattatgtggttattcgagcacttaatttcactcaaggttcattgggctctgctctcctccctgccattacgggagctgtggacagagctccctcacttcaagattcctagtgtttttgcacaacaggttgtccaagtgagaaagactgagttgcgtgtctgtaaatgtctgcgcagggtgcacatgctgcgaggtctccatcctccgggcctgtccctcccagatgggctgggcctttgggccctcctcagagtatgcctgggtacaaacctcactgttcagatgggctgtaagttctcacttcaaagctatggaatggattttagcaccttt

SEQ ID NO: 16271 - DNA, 1691 bp, Homo sapiens
gccagcctggctgctggcaccagcacctggaggtcctgaatggtttctacctggagacccaaggaagctgcttccagggctcgggacattgctacggaagtgtccccttggctggcagcctctgcctctgcctctgccccatcctggatggaggacgaggggagcaactcagggaaacagaggcctagagaggctgcggacttctccatcccaccctcggggttccgccttggcaggtgtacggctgtgcgtgggagggcacacgtgggttcacagtgtgttcaggagtgtgtgtatctggaggagtgtgtgtgtgagtgtgtacctgggcctgtgttagtctgcagatgctagtgtgagtgtgtcctgacatggctccagggcgtgtctgccgtgtttactgtgtgtctatgactgtgatgggtgtagctgatcccaggaggtggcggctgcgccatggggtcaaccattacagtcctagggcaggggcggcccaaggctgcatgttctccaggaggccaggccggggttgcccaggcacctccttccccgcctctgggggctgctcctgctgtggaggcagctgggaagtcagggaaggccactagcagaggctgagtgggcttctggctcctagaacaaatgtcccttcaggcaggtctgtctgccagaagccagagccagtcatgcgagggaaccacagacccacccgccccctcagccggagcagcccgagggagcagaggaggggctgcctggagcttcccaccctgctgtggtcatttgtcaaagggggaaggcacccactgcctacctcacagggctgttgtgaggatcagagaggacgacagtggggaaagaatctggaagtcttcaactgccgtctgatgggaaggaccgtctgggtgtccttctgggatgaggatgacagagcaacccttctcctgccctgaacccccccagctcacctgaccacctctggttctccagctccggtccttcctagcagcctggtgagctcactccttcccctgatgactggctgcctctacacagactcggcgagaggacttgaaggaagccctctgggttgtctgctgagtacaggggctcagtgaacactggcgctgcctctgagtcggggctgggcctgcagaggccgactcagaggagactctgctgcttgctcccagccccttccccggcgatgcccatcacactgtgacctcccatccctgaagggcacctgcctgagggcctggcctccttccagcttcatggacctggagatgtgccctttcatccttcctgcttcccaggccagtagatccgtttacacttttgggtcgacagtcagcttttccttttggttttggcgggtcccagaggcatgggtgtccagtccaatgtggggagccacgtgacaacgtgggggactgggacatgggactgggaagtcagcagacgctgggatagagagggccctgaacaccaggctcaggggcttgcttggtccttatcctgtaggaggtgggaccacctttccctgaactttctctacaacccttgggagcgtggggaggaggcggctggttccagggtcagtttactaagttagagatttggaaaacctgtgtcagctgtaactcctaggatattttatgtggaacctaacatgcagatgaaagctg

SEQ ID NO: 16272 - DNA, 456 bp, Homo sapiens
tgactcgcaacccctcaccccacaatttctttaaaaaagaaattatctttagttgaattccaagtgtattttaaaatagaggctttgagcaactaactaaccacattttaggatctcgcctggaaacagaggtaaaaaaaagaagtgtgcgcccggctaatgcagcggtgtggaccgaggaacaacttggaagatctacctgcaacacaacatttgtgtcactgtacagttttgtggactgagcgaggaaaaacaacaaataatttaagttggctagagcttctgtattttcaaagactgccacgtgccttaggaatactgttttatctccatactttggatgacttgttcatttttctctccctctttttctctgtatatttatgaccagagcaaaaatgtaaaaaacaaaaaaaacaacaaaaaaagtttgttactttgaatagtcctaaaaag

SEQ ID NO: 16273 - DNA, 1491 bp, Homo sapiens
gcgtggatgcaccgtgccttatcaaagccagcaccactttgccttacttgagtcgtcttctcttcgagtggccacctggtagcctagaacagctaagaccacagggttcagcaggttccccaaaaggctgcccagccttacagcagatgctgaaggcagagcagctgagggaggggcgctggccacatgtcactgatggtcagattccaaagtcctttctttatactgttgtggacaatctcagctgggtcaataagggcaggtggttcagcgagccacggcagccccctgtatctggattgtaatgtgaatctttagggtaattcctccagtgacctgtcaaggcttatgctaacaggagacttgcaggagaccgtgtgatttgtgtagtgagcctttgaaaatggttagtaccgggttcagtttagttcttagtatcttttcaatcaagctgtgtgcttaatttactctgttgtaaagggataaagtggaaatcatttttttccgtggagtggtgattctgctaacatttttatctacgttttataacttggtgagtgacgatgagagccctgcacctggccagagtgtcacaggcaaaaggcatcgggaagcaggagcatcttcttggcagccaggctgggccatcttctcctggacacctgctgtgtaccaggaacttcgtcacctccttgaatgctggcggttcatttcatgatcagtgttaagcattttcctccatgggaaggaagcatgggatatagaaaagcgaagggctgtcctttacaaattctggttctgcaacttcctagcgtgactttgggcttgggcaagtttcttagccgttctgagccttcatttcctcatctgtacaatgagattaatagtacctatcatctaccttcaggattgctgacagacagaatttgaaataaaatatgcaagttagctaatacaaaaagtagatgatccaaaaatggtagccactcacccttcacaaactgaagtccatggaccacggaagtcgagaattaatgtacacctgtatcatgtgtaggaaaccagaaatgtgttccttatttcttgttcccaaacaggattaactgtgaagactaatttataaatgtgaacctaagaaaactccacctctgaaggaaatcatttgaattttgtttttgtacgtaaagttaaccttccaattgtctgagctgtcgtcactgacttcatgacagtctggccctccagacaagagcagcgctggcatcgggcaggtgattcctgacacctgctgcctgcaggcattcactgaccaggcctttcctggaggaaacacccagggccgggcggctgctgtttccacacgtggactcggatctgctgtgacaccgtcagcccgacagtctctccatatgcagcctttcctctgtacttttctccatggttgaaataaaacagggtgactgggagttacttagaattcatgaagatttt

SEQ ID NO: 16274 - DNA, 4466 bp, Homo sapiens
gtggagacctgtgctccccggagaggggcagcagtgcgggaggggctttgcacagcagctcctgcaactgacccagtccgcaaatatttattgggggccagcccagggctgggactgggcatgaggtggtcaccaggattgagcttcctcagcacccagtgggtaatacttgcttccacttgcagagcaccgtgccaagcacttcccacacacttacccgtttgattctcctagcacctcccttggaggtagagatcatgaacccatttaacagacgaggagacaggctcagagaggcaccgtcccttgcctaacacctcagttgtgatcaggcaggctgtgctctcaggacagccccattttagggatgaggagacttcaccacgccctcccctccctgccctcccccatctccccggtctcccttgttctctcaacccagtctcccttcccagggccactcagaaccagaggtctttagggccagtgtactggtgtggggtggaggccctggctctgcctgccatcctagggccctgttctggctgagctgttggtggccctgggctttgggccccttagccaatgtccttgtctcttgtctttggccagccccctcagcccagcccaccccacccgctgtccggccacattccaaacctctaccgtcacctagctgctgagcagaaaccgcaccccgagagaaaatcccatcctctgttccaaggcccctgtctgctctatgctcatttttattttctcttattcttcatcagtgccgtcatttgtttctgcagcagcagctgagaaggcagccggcagctctgccagggtggggagctgagctgaggctccctctccacccagaagcactggcgttgttcacatagtcaggccttgggtcccctccctggttcatcccagagcctttgggcctggagtccgccttgtcctttttctctgggctttcaaacccacaacctttacacactcagggatacctccgggtctgccatgaataagaccctaggcccaagtctggtgtggtgccaggatggcacagtttccctcttccttgccagccctgacctggtcactgggcaggctggcccagcagcctgggggctgcagaagacatggtgtgagtagttgggtccaggggaggcatcaggccttcttctggttgcaggagagaaccagagggtgggaacggggagggaagaactgagggtctgcagactggacttttcctggctcgacccaggacttgggttgaggatgcacgggggccaccttgcccggggccactggtggctccccagagcctcagacccacacagcccagaggacgaggccttcaagcctgcccctcttctgcttttttagacagtatttttagagctggaaagaaattttctagcccaactccctgtttcatgaaagagaaaagaggctcagaaaagtttagagagcagctcagtgtcacactgggagctgggcacagccgatctccttccagaagggttctgtctgtatcctttattctccgcacatggaggctgccctacctgggaaggcaccccagcacctgtgaaggacatttactgctcatcctcacctgccccctggcccttgctgccttcattctgtcccaatgccagctccctggatgtctgtatgtttgaataccagttgccatgttaggaaggtcagctgcacagccaagagtgtaagagtgtaaagaaatgcctttttttttttttttgagttggagttttgctcttgtcgcccaggctggagtgcagtggcgcgatctcggctcactgcaacctctgccccctgggttcaagcgattctcctgcctcagcctccctagtagctgggactacagcacccaccaccacacccagctaatttttgtatttttagtagagacaggggtttcaccacgttggccaggctggtctcgaactcctgaccttaggtgatccgcccgcctcagcctcccaaagtgttgggattacaggcatgagccactgcgcctggccagcaaatgctttttgtgcagaatacacttctttcaggcattgtcaggtgctgttttgtttaagctctaactcacccctggaatacaggggaatgatgacaaccagcccagccaggcctgactcatcatggtcacatccagcccccacccccggccaactaaccactgcaggctcctcttccagactcaccagggggcctcgaggccccggcatctcccttggccctgggtgtgggttttacaagactgtgtctttcatgacatcatagcccaaccatgtgagaagaaggagaaggcccccctttcttcattaatctgaaaaaaaggaaagtgagaataggctgatttttaaaagttaaggggcaagcagcattgcattctgggggaacgatcctggccacagccgccaaacaaacattcactaggcctcttctgttttcatacccttgtaagtgggttatgtggtgggtatggtcagttttttcttttttcttttcttttcttttttttgagacagagtttcgcttttgttgcccgggctggaatgcaatggcgcgattcagctcactgcaatctccgcctcccgggttcaagtgattctcctgccttagcctcctgaaaagctgggattacagggccctgccaccaagcccagctaattgtatttttagtagagacaggatttcaccatgttggccaggccagtctcaaactcctgacctcaggtgatccacctgcctcagcctcccagactgttgggattacaggcatgagccaccacgcctggccagtttcttcattttacatatggtcacattggcgcctagaacagttaggtcgctcgtcacataggcagttaagtggagaaccaggtttcaaaatcaggtaagaaaaccatcatcattaactgagcaccagctgtgctaagcctgccacgggcgtatccttgcagcctcacaacagtgggaggtctgtatcctgaatgtcctcattttacagatgaggacattgaggagaagagacttacccaggctcacacagcagctcagcctgttccaggcgctggtcagtgcgtgttctttgccaccagcctgtcactccagtggcagctccagaaacggaggctgttgcttttatccctaaactgcatccacagagaagccccaagaaggaggttggggccagctcataaaaagcctgaatgccaagccaaggagtggatgcctccagtcatatttagaacaaagtcaagtataaatttacagagaaaaaattctaagacagttggatgttgtcctgttggtgaggaagggaaaggtttttcttgtagggaactggaaccagcccacaactgcacacttgtgagctgtcatggaaacctgatccccaacagcttttgaggttgtttgtttgtttgtttgtttacctgtcttgggctttgttgcttttggcaaaaggtacttcaaacaagggagggcctggactgagggggaccaggtcttcttgctgacctcgtctacaaaggcaaaggaaggcaaaggaagctgtctcgggtgtttctgaacaacgtgactcatgaggggctttggctacctcttgcgttccccctagagatgtccaggccttacatttaatcggctttctctgcggtggggtagagaatggagctcccgccttgcgggcagtgctaaaggtggagctgggggattttcctgggaatgatttgagggctcttgaaagcccatgtgttccaaagcgtctttaactctgggatagcattggaagccgctgtcatgacaggacatggcactggatggctggcagagagccctggctgggagttagggagccctgggttggaatccagccccacctcttttatgccacaggtttggtcaagttctctcccgctcagggtagggctgtgaactccctcttacagctaagaacatgcagcttagtgaggacaagacccttctagagctttacccctaatccccccccaggagccccgaggccggcattattcctccccattacaggtgatgagcctcaaattcagagagcttaagcaacctgctcagggtcacgtctccaacaggcagtagagtcaaggtataaaccaggtctgtttttgtaccagagtcccagactaactgttggtaggaatcttgtaaccagtcatgttttcttccttgttttggccgctgggaagctcaaagtcaaattcgagacccttttttttccaattgtgctgagtctcctactagactcgcttcattctagctttctgcttttacctttaccctaatctttttatttttatgctattgtactttatttttgtaagttgctgagatatctgttttgcaacaagatgggctatatctaaataaagacatgatcaaaggtttgattt

SEQ ID NO: 16275 - DNA, 476 bp, Homo sapiens
aaaaaataaaaagactcatgttaccttgagaagaattctggatgcccaggctggtgaagaagggattgacaatggaccatcttcctaggaactcccaagtaaactatttcaggacatgtatctgctgaaatgtattttattttcaaggtggaggggaaaatcgtctgtttcctaaatcctgtttaggatctgatagtctatgcctttgtctccgagtactgcagaactgacattttgacggtctaccagcgtggcggctggtgttggtcagatgcacctgtgtgcactgggggagggatggtttgggcaggtgcagatccaagggctgtggtaaacgggagagcttgtgtttttgaagtggaaaaaaacccaagagtttgtacagacatcctgtcttcccagagaaggtggacactcttgggctcattgtaaagtgcctgctgcatcaataaagctcttggcttattagtctatac

SEQ ID NO: 16276 - DNA, 178 bp, Homo sapiens
taaaacccacatttttattacctgtcagttactttcagaatagttaagtaaaacattagctgttttatacctccaaaatatcttctgcattatatatctgtttttctcctactttggtaggtgaagaaactaatgcaaataattcttatgtgcactaaaccttgctatattgcctctc

SEQ ID NO: 16277 - DNA, 2264 bp, Homo sapiens
ccaagaccaaggcccaccaaggcagcagactgttaatcagacaaacagatctctgagaaggtgcatcagctgctttgaaggctgaagattgttttgtatgatactgcacagcatcaggcattttaaagcagatctttactaaacaggttaatgagctaacaagcaggttctctcgtctttgggctctttcctttctgagttgcatattctattttcttgtccccaagtagagactagtactacaaaaagggaccacatttttcaagtatttctaagtataaaaaacaaaacaaaaatctcttaggaaatgtctagacctccattcttggattccctttctttccttttattttaaaaaagaacagtacccctcttttaagatgctgtcttacattaatgagcatctaatggaaagaaggtatgagttgcactgaggattagaatagtggtgcgttagtggcattatctataaatacactcacctaaattgaaagctaagaaggaaatgtaaatataatatatatttatatttgatgtaatatggacatctgcagattctaataaacaaggactattgctgatagtaggctgtgacatactgtcttgtgaaatggtttccttgacaaaatttaagctgagcttaaaagcaaaaaacaaaaagtacacagaaatatttattaaaatgtaatacagtttattgaactttctaggtatggagtttgatggacagggctgcctttaatgagtgtgaaggtcactaagtcacttagacatctcaccgtggaagtttgtgagcctgcattaggagatagactgattaccatacatgacataaaaaggaacagtggatagctcatactttatggtggttcttctcctccgaaataatatactgcagaaatcccagacagagctccttacaaacctttaattgtaatatatttttgatgattattcacattgaatgcacagaccaagaattcagtgaatgtcattttttaaaaaactaatttgtattgtctgctctagtgatacaagttttactagtgataaactattttaatcaaccatactattcttatggaaaaaaatatctattttggcaggtttctgtgcctttatttccctcttctgaaaaaaagtctgtgttttcatagtttggtttgcattgtatatcaataattaatcaggaatgggttttggtgcctgaaaaattggccatggaggcacaccaaagcttcaagcacaagtcttgtacatgggccatcactgtctggtttcacttcgtgtgtttcctaaacacatttagctgcttttttaacaaactcagccccatacttgagtcccttgttgttgggagcatttccaggcatcttttaagggaactgtgacaaacagcctcgggcagatgaacacggaggctctctgttgtctgtctctgagatctttgtgtctgggaatgcctaaagattttatttttttttctttgtttttattttattttattttatttttttgagacagagtctcaccctgttgcccaggctggagtgcaatggtgcgatcttggctcactgcaacctccacctcccagttcaagtgattcccctgcctcagcctcgcgagtagctaggactacaggcgcatgtcaccaagcccggctaatttttgtatttttagtagaaacggggtttcaccatgttggccaggatgatcctcaatctcctgacctcgtgatccacccgccttggcctcccaaagtgcgggattacaagcgtgaaccaccctgcccagccagaaactagattttctttatgcctccaccccttcttattcatttactttacaataccaaaataacaaattgcataggagtgtgggatgtggtttctgccttctagagagagatcagaattaaactagtactatgaaatgtccttttgaatgttaggtcaagaaatccatgtacagagtcgtgcacttcattggctgtaactgtcaaacttgccttgtattagaagttaaatcccatcgtaaatacatcacgaggccagctgtgtgatttctgagacctagatgagagtccatttacttcagcctttgattcagtaaatgttaagcagcagaagacttcgaatggttgaaattcattgttacaggatttaactcataaaccaatgagagattttttttttctctgcaatggttgctaagtctattccatgttaacactgtggaaataaatatgaagatgtggacattgc

SEQ ID NO: 16278 - DNA, 1451 bp, Homo sapiens
tctctggccacacttttccctgagctacatgccttgataagtgcattcagagcaataggaggaaaaggaaagcgtttttgtagcccaccatctacagctttactgtaaaaccttgtcttattcgagaacttggtaaatctgttttttaaggaatcataatcatttgtatttatacttaaaaacacacaatgttaaaaaaaataaagcactttatccaattaggccaagatttaacattgttgacagtcctgtagctattttatcataatttattatcaatattttacattaatggtttcacagttgccaattacttggccttaagggtaaaaagtacaatatacactaaacctcaaccgttaaagcagatgcaaaaattcacctcacctaaattgaacttcttgcatatttccattactgacttggattgtctttctttcatatcactaatggagttggaataaagagctgtttgcctatccctgttaatgatggttgtgtttaagaatcttcctcgtcacgtttgtgttcagatctcttatgttataattagatcagagactggtagcatcgtttctctctctgaaagcaccagtgcccagagtctgctcggtaataaaattatggatccagattgttctgagagacgaagatacttgctgctgatagaggtgaaaacgagattgatccgtctggggttttacggtgtgcactgggtgctgcacagacttgtcaaggtttgctacgtcctctgggcatctgcaaaaggccctgctctctggagtgttgtatatagtgtagcaaaagagtatttatacatcccaccaatcaaaacacagctttattacctcatgcgaactcatacaaaccaatagaatttcaacatgttctgtagcttagagtgctcacttactacctctgaacaatactcacgctgtagtttgtctctttcttatctttttgcatcttgtaattaactctttgtttcccttcataaaatgtaatgtacattgtaatcttttaaaagaaaaatcagggttgcacttgcaacttttaaaaaaccgagtgtggaaacattgggtcttaattcaacacaggatcggtaaaactgttgtaaatactgagaaacattttgaatgttcttcatcttattactaatccatgcaaaaaaaaaaaaaaaagcagcgactaattgtgatgcattcagatttcagtattcagtactgtatatttcaccctgtgtaatggggccccctctcctttctctctttttgtattgtatgcgattctgaaactgattgagtcatgaaaataatttgtggcggtgattctaatgtattaaaaacgtttcgtgttcctttctaactggattacaccctggattgaaaaagtcttcctcgtggtagttatatgtagtttcaaacatgaataaactttttgctttcatgatt

SEQ ID NO: 16279 - DNA, 3777 bp, Homo sapiens
ggagccagcggccacctgcggggagaccaccgccgcccagactactgacggcaggggctgctgcccccgcctcctcctgccgcctccgccagccctccctcccacactgccccagcagggctggcccggagactgggcagctaagtgggcgcatcctgtcttcagctggcctcactgacaccccggcctccctggggacattgttcataaccatgactaatctgtgtgtgctgtagtgaccagcggctcctaacgtgtctgtgtgatgaccagttgtcctccaaaaacctcactcaccacggagtcaccctgagggccccgggcagttgccctggccgcccagtgacgcccaccggctccctccgctccctcctgtcacctaccagggcagaccccactaagccgttgagtctcttcctggaagaccctgagggccggcagctttgcctaggactctccagggtcgctgatcctccccggcccagggctgccaggaacaagttcctctctgcaggatctcacagcagccctgagaagacatgggaggaagaagccagtggccctggggtggaccctgccctttggacatcccatggacttgtcacccagtcgcctggaagtcggggagcagcacccctgcccccggtggaggggttgttgctttctggggaggaggacggttgacggccctgcttggatccaccaccaggacgctgtgctcggccatggcgcgcctcccccaagggctcatctgtgcaacaaccacatgccaacaatagctccaggtgcctcagccccgtgccctgacccggggaccacagggacaccctctgagacgtgctggccccaggaggatacaggcacacgggcacccagcccctctcagagccaggcgtgtcttgacggtatctgctgacgggaacaagtcattctgaaaggtccctctgacccaggtcaccaaatttgggccagaactggcacttccgagtgcccactggtgctggcgtcctcaaagtgccgggcgccaagttcagccccaggtgcgtttgcctaggcagtggtggctgccatccctcggggcccaggccctcacccgaagggctgcctcactctgtggtgtcaggcactgggctgtgtcctgattcctcagagtatggggacctgacatctttgggtccccaagagttggctcttggatgtggaggcttgatgctgcggttgggggctgcactacctgcgtccgtggaagcctctgcctcagcggggacggcctcctgctgcaggtcctgggcagcccacagtagtgctagctgaggcccagaggaacgggaggaaagggaggcagcgccggacggcgcagctggccaagaggcgggcggggccagaaatacctcatgcccctgcaccagcccctccgtctccaggccccaggcctctttgtggacccatcttcctcctctgccaccccgatcttcactcggatacctcttgatttctgtggataagggaagcggccacttctccctccctgagacccgaggatgcccctggtgggggtggccttctcaggactcctgggtggcacagcagcaggaccttgtcatgggactgatgctgagcagggagggggctgccaggctggctgccgatgctccgttcacataagccagtgtggttctggggacctgaggagccctgtggcacccacagggggcacctatgtctgccgtggctcctcgggtggtgccctgtgtgacaaagcccaacagcaagggtgactcctggcaggtgggggcagcaggagggcagagggcagagctctggccacttctgcccacttcattagggtttgtgaactttgtccttcacctcttttcgtgccctggttgtgagattgcctctaacaggtaatgccaggggcccttcactccgcccccatgactgggaagaggcctgtggcagcgccgctggaccctaggaggctcagaggcagtggtgtgggagccctgtctgcaaggacgcagaataagcagtgagggcggctgcaggagaggaaggggctcccacagcccccactgatgccgctgcaggcccctgtcgagctggggtcccagccaggtgcccccgcatgccctcctgcagttgctggatggatagggacaccaggaagaggacaaactgcatggactcaagcgagctggagccatcttctccatagcattacggacttagcataagagtaaatgactgtgaacgttgtagtaaacggcagcttaagataagtaagcagagacagtgttaaggacgagttggtgtctgtggtagcttttaggctgctcctaacccaccatttattgccttctgagaggtgggtgaggacaagcatgtgcctgtgtgtgtgtgtgtgtgtgtgtgtatatgtgtgtgtgtgcacgcacatgcgtgtgtataagcccacctgagtggggctcgtgcaggagaactgaggcatgaaactctggctcaaacctaggaattgagagcgtttctgtcttttgggagagtacttttctccacgagccctctggccactgtgggagggaaggacaagggttcccttggaaatgtgaagggtcttggcctcatccctcaggtccccccacagcacttcccactactgcttctgtccctgctggcagcctctgtccctccagaacggctaaccagagcacactgtccccaccgcctcccctttctctctggaaagttgaagtatctccaaaggccttggaaatggcacaaaggtgataaggagcaggtgctttgctgcagtctcccttgcaaatgtataattaaggcctttcttcccaccccaagtccaagaacaaatgccagccacgtcctccgccacttggagagatgagaacccagtggggtcacgtaaaggaattgcaggtcggtgagaggacaagagggactcccatgttctaagcacctgttcctggccaggctctaggccaggctctctaagcacatttctcctttcattccccctaaaaacagagtgacctggaagtagatgttctttgctccttgtcagagttgaagaggctgacttggcccactgctaagcggcagaggcagggccagccatcctgtcgcaagcccgtgctggggctgccctttctgtttccagtccagttacggacttcccggccgccactgggccctgccggtcaccaggccactgtgcagtgggcgcagagcatggtcaggagtggcctgcccgtactcctccacccagatgagggccctccagagcctgcaggcatctgtggggaatcccagcctgcaggttcttggagaagcaggtgaacctaaggatgaaagcaaaggagggccttgaggaagcagcccccaggcctggcagccacgcagcggctgagctcatgaacttggttcgcagcctgccttgcccctggaggccacgccaggcgctcacccctgagcccacagcccctgcttgggctgcctggcaccctcagggtggcccggcctcctcctgccactctgagcacatgtccgggggttgccaccagagacggctttgttctcccagctaaggccgtggagctgctgtgtgactgtgtcaggcctggacaaggaagacccttagggatgacgtccccgctgcatatttattcaaggtgactcttgtacttggcaagggaagtccactgtgtgattgtctgtattcttaatataatttgttaaataaacgtttgttttaacctcttt

SEQ ID NO: 16280 - DNA, 1932 bp, Homo sapiens
ggccttgtcggggtgtcttgcgttgtcctgtggtcttaggtccctgcacaacattttagaacaccaccacttagtgtctgctgaaatactgcaaagtacagctgaataattgtagaagcaatatatctttagaggagatttttaaaaatccacttggaaatctttgcattacatgaatgcaaaggccattctatagtctattttgtgcgtgttctgcaggcttctaaaattgcagattatgcaacttaaaattggctccctattcaaaagagctgctagctacacacagacacgtgctgtatagccatggggttgggatcactggccttaaggtcaaattccttctctgtcttggccagcaactcatttgaaacccaggagggtaggtgagttcttatattcttcattttcatataatttctttttccaatgagctataaagtaagaaatgggtagtttgggtatgagagaatagtgaggagtttttcaggaaatgctagttttaacaattgtctccgcaaagaaacttgggtgagccaactgtttgctctgcaactgatttcagtcataacagaggtagtaacagtctctacactttctgcaaaaagaatcctgtcaaataaaaatcctgtgcatcactaggagtaaactaagggcaaggaacaaacagcactgatggattaagcttgagaaagggattgcaaaagtaaataaaacaagaacggtgaggcagcaacacttagggattgacataacgtaaatgagaatggatctccaagcttccacgtgggtgaatagagatgaacaaaatctgtcaggaaccggacagaagagtcaccagtaggtcttcctgggccatccacaatacagcctgccctccgggacataccaccagctctctgtactctgttcctctgtgccaagcctccgtctcacttggaagaatgtgctgtaatgaggctccaaagccctgaggactctgtcctctgggacatccccctataaagacaatctggtccttctcatgacagtttcacaaaccaagagtggtatttaaacttaactacccctggaattgcctgaaactttagaagtagttttcagtttcatttggcataaaaagataggaatctctaataagcctcccagagttgcagggtgaacagttgagtctctgttgggttcaagagtgtgaggttcgcactgcccatcagcacttgttcctcacttctgagccagagcgctgtcagctccgccctggagggcactgctgagggtcactgtctcctgtgctcaaggctatatcaggtgtgtcacctgtgctggggagtcagctaagtccatcacctgtgtgtcggggtcctccatcacctgtgctgaggcccatcacttgtacttggagcagctcaagtgtgggctccttgcagaggctggaaagcccccacaggagcagttgccctgaagttgttacagctgctccctgctgacatcatgtggtctagaagggcccagaaatgggcaccacctcaggcaggttttgactttctgtggttaaagaaagaacaccagttctctcagataaagcagagagagctctcagaagcctgctggtgactgtgagagcaaagtcacttgcacctgaagcaagacagccgagaacaccgagccaccggcagcctggtgggtttggagggtagtgcgtcagaaccagatgtttataaggcttatgtattttatcacctctgctgtacagtttatggtttacaatggctgcaaggaaatcggatcagttttgttttacttgccaaataaaacaaatgtcaaaatagtcaatataaaatgtattctaatttggctgagttaagtcagccaatatgcaacaggataattgaatgttcattagtgcttccaagtaaaagccatttgtctgtc

SEQ ID NO: 16281 - DNA, 1304 bp, Homo sapiens
aaataggatctggcccttgagtggcatgcacaaaaataaactatggtaattaatgcaaatctgggcacagatgatgcgtgctacttgctattatgagagaagcttaaaaaaaaaaaggaagatatttctgaaagaccagctctaagtaggccaattaaaaaaatctaattcctcaaatttgtgtgttccagtcctggcctggaatgggtaatggggtgagttaacccaccgcccagctggcaagggaaaccttctgactggttgtgatcgaaacaggtggacagagacacctgcacttggaactggactccacccaccagttccattttgggtggcagcagctttggatcactcattattacaaggtcatgctgaaattttattttgctcttgctatagatacttaggtaatgtggatttgttttggtagctatttcactgaaggaagtgctacttatataaaagctagaaataatgtgattcctaggatgagaaattggttaacagagctctgttgtctggttttagtctttctaaaggatattttaactaaaactatggagatgctaagagagtgactttctaaatatgaaacagataatttacggtacaaggctgacatagtgcccttgtcagtttctgtaagatgccactactgtcacaaggtgtttcagactcttgataaggcagtgttttgtattttagttctaacattgagtttggacaattttatctaattgtaattctctagggtgccagagataggtatttctcattggtttgctttcccaaatcctgtttggttaattgtagcctccatacagtggggtcttctctgtggctggtagacaccaagctgctgtgactgaccacggtaccacgggctgccacagcccctgctctgtcttagattatggtgctttacaaagagagtggtccatgaccacacttagtgagaaggagccacaagttgtggctgagagttccctgtgaacttgagtagttcatagagtgctaaggtgacactccaccaaccagagtgagagggcagataggcaggattctatgagtggttatacttaagggggacaaaactgcccaagaagaatcttgagaatacactctttcaaggtgggggagatactctttagagggtacactgagctaatactaccagttctttatgagcactggaatgtgtttgtaaaaggagtcctaagtttagcaaggtagtctacagaaccatgctcccacattatagataaagctgcttaaacttaaaagtccacaaagctacgccgacc

SEQ ID NO: 16282 - DNA, 4395 bp, Homo sapiens
gtctctgcaggacgtggcatgacttcagaggcttctgggaacccaggctgggcctggtggtgaagagcagtcctgggcacaggctgtgagccagggtgctgggaaactcacagctggactcaggggacacggcctgtggcctcaccatcccagagggcttcaccagtgtgggatccacctgtcagtccccagcgactctcatgacactcattctgcagcaccgcctcttggggcagtggtcagaccccacacgccctctctgggcccaccacctgcatctgcgactagagagcacccggcccacgttgggttctcagtgctttctactgcacagagtggacagcgctaactaacctgtgagaggggcccgagagaaggaacagctgtggaacaggctttttacaccccaagtgcatggggttgctcgcccacagggctgcctcagattttgtacaaccccgaagcgtcctctgcgtgtgcgtgctgtacgtgtgtgtgtgtgtgtgagcgagtgtgaactcttcaagaaacatgcattttggcacaagactcgtgacatcacacacttcattcgctttgaggccctgctttaaccttaagttatagccctgtccaccgaggaaggtcagggtgagagcctagattcctcctgtgtcaagggtccctcgcattcttttactgtaaacaaacaatgccttaaattgtgtcttgttttctgttcctatgggtgctattcatctggaaggcctgcttccaggcctctttgctgtcagcccttctgagacaggacctggcttcaggactgtggactgggctgctggcctgcttgcttcctcccttccccattcctagcagggcctgaggccctcctcttctcgcccttcccaccatgccagaatgggaagttgtgacgttgcagctccaaccgacgtgctcatagtgatcagctgtgcaggagccatgaggcaccaacctctccccgcagggcaaagcctgtgcccccatcatctcactcctttgcctgcactgccagggtggggcccaccaagattcctgatcatgacgggaagctgagtgaccctgaggccttaagcttccccagtcttggccccaaatgcagtcaccagcaagttttccattttccaagtccaagggcacaattgttgatgaccgtgtgacaatagagcgaagccccggggagtgaacggtccaacctctgcattcagttaggagctcttcacatgaatcacatccttatctgtcaccttgtgtcacattttaaagtgacttttattttgcacaaataatttttattcagaataataaatcactctttatcatagtatcttctcttccctcttcccctttagtttggatagcctaactctgagaagttaacccttaaacagttttctggaagagactgaatttctgggtccttgcagctgtgatggtttcagagctcagactgatcaggcatcaagctaccctcaagagtttctgggctggatgtttcagaacaacatctacaccagtaaagtgtaataggtcagtttcaaaacgaccaaaagacccaccactgtattttgaccaaataatgacaacttctttagaaatttgaatggcttggtgaggaaagtagttgtcaccagggcctcattttgtagttgagccttacaatgcttagtagttcatcttctttttgagcaaagactagaatactttcctcctaagagaaactcccaggtgataaaagttgatgccatcaaaccttgacaccgggtgctctgcacacccacgcggatgttgcacctcattctcccgatgactattcaaatcagcatctagaggctgaatgacaatgccaaacactccacctctgatcagaaccatgcagtgttaacactttaacctacattgaatctgattctacctgttaacttttaaaaagtcgtaagtttggatgaaagtgcaagatgtggaacatcaactacctattttccttgggtttttccactctgcaaactgtcctggtttttcacaccaatgaagtattatagatgccaatccaaaacctcagaatttcaggcaccacaaaaacaggtaattttctatcccttataagtttgtcttttctttcagaaacatctcttagcctaatttgaaatagcacaatcacaattcaaaatgtttagtcttctcactaattgagtctgcttccacgtcctctcccaggaacattcttagctcggactcttgaagaatctctttagattttgttggcaaaagccttatagaagcagtaagaggcttgaccacgccggaagagtcctggagctaaagctggaagacactcagctctctaagcaggggctcggccaaacatgggagttaagtgctgcttgtcttcccagtgttggtttgaaccctgtgagcctgagacagagagggccaggcaccaaccacaaggcgggaaagtccatgggtagaccctccccctggagggaagcatttctagtttttgctccttgactgtccagagtgtacaaatgttcataacgccattgaagggattatttcttgcatgcatatgctgaatttttttaagcaaatggatcatggcaccccaaaatgaaagttatagaaagctgtctacaactgtggagttggtagctggtaacattgttgtctcaagaacaactcacctctctccctaggactaatttttgtctctctcagttgaacatgttttgtcattcaagatcagtcaggtgcattctggcaactgacatacttgatggaggattgattcggtagagagcagtagaaatcttgttctaactgtgcctggtgagagactttggccccctccctccctataaggctgtggaacctgaggaagtagatacttgaagagattctgtttaggaagaaactcactctcttttgccagttgaatttatagagcattttttttcttaccaagatggccagtatcattttacccccacctcccaagccccaagaggtgtaccttttcagatgccattttacaggcggaaatgctccatgaaacaggaagccacttgcaagcaacatctgctctgttcctcaggtggggcccagagcccttccccgagactgctgatgtctgtaaccactggggagcactgccaaaaatacagctttctggtttgtgagcccataaatgacttaaatcagctttacatcatttttacatatcaagtggtttcatgttaaaaaacaaactcctagtcctttagaaataacagattctctgcacaaaaccacccattcattcatttattcattcacagcactagcaagtgctgcctatgctgagaacaagtcagatctgatccctgccctcatggacctgaccactcaacaaacagtccccaccacacctatctccttaggcaagactttgcctctctcctagtcctgagtataaatcctgtgcatagattcctctagaaaggcatcaaaaggctcaacagactgaatggcctcttggtctgcgaaaattcagttgcaatgaggatgaagtcactatcctagaggctgcttggcccagaagagccaggcacagagctgcagttgggcacgccaaggattccaaaggtggaatgagagagtagggtcaaactgtcacagtatctgctccataggtttctgtttttaatttcaatgttaaatacaactacaatatgagcgagaactgcattttcttgggtgttgagaacttgtaccatggacttcagaccgccttgcagccgtatgctgcacaagcgtgtacaccccctgggcagcctcaaaaccccgcttacagcagcaacacaggagatcatctgtccattttagaaccattaatctctttatccattgctgaacgactgtgactattcagtaacgaagtaatagtaattaattagtatggtataatctttaataaatttcgtgccaaaatgcatggttttccacttagcattcaaaatgttgcatagagagtagttttcaatttcttatgtactcttcgaagtaagttgaaaatcagtttctacattttaattcgtttcctgttaaatctgttgcactctcctgggctgtctttttctccagcagacccctgcatgcagttgtgtaaggactttctctaattcttgtgaatcgtctcacccgcagtaaccactgaacgtcaatcagccctccatggggttctttcgatttttggtgaagtattttgttacctcagtcttgtatcaagttgctgtatttttcagcttgttacattgataataattatttcactaattaaatactttaatgtacaaacatctttgtttactttgaaattaaatgtgttttccaatg

SEQ ID NO: 16283 - DNA, 293 bp, Homo sapiens
cagagttgaatctcatttgccatctttagttttcttatggaggtttatactctttaaacagttctgatgtaatttctcaacaaaatgtggcttttagcctgtcagtgatctattggaccaaaccttctgcacactcggccagttccctctccaatgtccggtgccatctttcctgacctttgtttctttctgttcaggaaccatcagtccccttgtaataaaggtggtagatttcattgaggttttagattgaaactttgaataaatcaaaaatactcattcttatttactgc

SEQ ID NO: 16284 - DNA, 633 bp, Homo sapiens
cagccactcactaggggatggagcaagcctgtgactccaagctgggcccaagcccagagcccctgcctgccccaggggagccagaatccagccccttggagccttggtctgcagggtccctccttcctgtcatgctccctccagcccatgacccggggctaggaggctcactgcctcctgttccagctcctgctgctgctctgaggactcaggaacaccttcgagctttgcagacctgcggtcagccctccatgcgcaagactaaagcagcggaagaggaggtgggcctctaggatctttgtcttctggctggaggtgcttttggaggttgggtgctgggcattcagtcgctcctctcacgcggctgccttatcgggaaggaaatttgtttgccaaataaagactgacacagaaaatcaggtcagtgtctctgggctttgtgcaagctcagtttgaaaagggtttattcccatcactgcccaggacaccctgtggctttacttgctcatggtcagccaagcttacccttcacactgagaagtcatttctggctacttccttgggctcagttccctgggtcatcagccatcaaatcttgttgagtttaaaaaataaacagcaaaaaaaaacaaa

SEQ ID NO: 16285 - DNA, 174 bp, Homo sapiens
ctaggaacatggtagaagtggagagagtcccggacatgccgactcaggacaggtgggtgaggatctgagaaatgctaaaggcttgaaagcatctgaagacatctaacttagagtctgcagcccagagccacatgcaaaacaccttcaataaacagccactatttcacatgctgt

SEQ ID NO: 16286 - DNA, 600 bp, Homo sapiens
gtgctgcccgcccacctgggcctggtcctagccctgcctcggccactgtgagccccgggctcctgctcagccttgtgccagccagactcgtatgaggctcccccctgccctgggccccttccccactgcccaggagcccccatcctaagctccaagcatgtctgggccaggcagaggtgctcctcatccatgacaccaccagtctgaatggtcctgggggctggggctggagaggccgctgcaccaccacccgagcctgggagccagcgtcccagcctaatcacggatctgctgcctcccagctgtcttgactgaaggccaccgcccctgcaggagcttgggtcctcatctgggggccatgcacaggcccgtcccaccctgcatgtgggaagggagcaggagggcctggctgggtgaggggaggccttcctgggaaggcgtgtggtgcaggcctgtgctcacagtggcaccagcaaccctgggtctccctctctgctgctccccagaaccccggggccctcctgctctccacaactgtccctccttaccccatgtagctcgatccgaagcaggagtgtcaataaacctgtcttcagtgcg

SEQ ID NO: 16287 - DNA, 1942 bp, Homo sapiens
gatccacacacatcctcaccccacagaaactgctggacacactgaagaaactgaataaaacagatgaagaaataagcagttaaaaaaataagtcgcccctccaaaacacgcccccatcccacagcgctccgcagcttcccaccaccgcccgcctcagttcctttgcgtctgttgcctccccagccctgcacgccctggctggcactgttgccgctgcattctcgtgttcagtgatgccctcttcttgtttgaaacaaaagaaaataatgcattgtgttttttaaaaagagtatcttatacatgtatcctaaaaagagaagctcatgtgcaattggtgcacagcaggagaaatttctggactgttaggatgaatggacgccttctccccgttatttaagatttgtgaccttgtacataaccctgggtgacgtgcacattgcttgggtatggaacggtagaaatttgggtgtttttaaaaccttgtttggggttgttcctgtccttgttgagaatcatagagatgtctgtgttcttggagtatttcacactgaggactaatctgctatcttcattccagtccctacccctcagtgcctgctctcatccaaataacctgggaggtgacaatcaggatatctcaggaggtccaaggtggaacagacctctttgcctttcccagcgtctcatacccccggtagtgcagctgtgggtggaggctggggtgtctgcacgaagtcaggccagcgtcctcctccacagcctgtcactgccccctccccagcctgtgtccacagtgctgtgatcccgagggaagtcctccagtctaagtcacagtgccctgacaggtgagaagcaaactcccgctggaagcctccatctctttggaaaaacagttagtctggagcctgtggcccaggcccttctgtccccaggcatcatcccaacagctcattttccctagtccgccttcgttcaagggtcaggaatggaccagaacagatgggttctggaggcccctgaacagagggctatggctgtggagaaggttcttggcccgttggactcacacagaccctgtaccctctcggcaagcatcttcagtcagattatcctcagtttcagatacttcataataccttgtgttgtgtggggtcatacatcatcgtgtttgtaagagaagatggtcattttattctctgtataaaacttagctctaaagcagaaactaaagcagcaaatgcaggaaggctgtctcgccatcctcaagactcagcagctctcattctccagtggtgagcacaccatttgtgctgctgctgttgtcgtgaaatataataacagtggaagtcacaaaaatgtcccctgcccagccccctcgccgcccttgacctcctgcaggccatgtgtgtattacttgtctagtgatgtcctctcaaagtgctgtacgcgagctcggcgccacctccgcctccctttcagagcctgctccccgccctctctgctcgctgcattgtggtgttctcttctcaaggctttgaaatctccccttgcactgagattagtcgtcagatctctccccgtctccctcccaacttatacgacctgatttccttaggacggaaccgcaggcacctgcgccgggcgtcttactcccgctgcttgttctgtcccctccctcggaccaaacagtgctcatgcttcaggaccttgtttgtcgaagatgttggtttccctttctctgttatttatataaaaataatttatcaaaaggatattttaaaaaagctagtctgtcttgaaacttgtttaccttaaaattatcagaatctcagtgtttgaaagtactgaagcacaaacatatatcatctctgtaccattctgtactaaagcacttgagtctaataaataaagaaatcagcaccccttcccggtgtccaggggg

SEQ ID NO: 16288 - DNA, 119 bp, Homo sapiens
gacacagagagaagaacctactccagaaatggactggtccagtcacagtcacccccactttaatccgcaggcagcctggaacagtctagaggagatttgtataaaaagtagataccaag

SEQ ID NO: 16289 - DNA, 195 bp, Homo sapiens
agggaccatccagaccctcccttcttgctggggaggggacgagttctacccacctccccacactggcactcagccagctgcctccttccagagcaattaaaagtcttagcaacagtcctctggtcccacagctgagtttattatacttgttttcttttacaaaattaaaaacatctaaaaccaggcccaagtggc

SEQ ID NO: 16290 - DNA, 541 bp, Homo sapiens
gggccggcgcttgccactagggctcttgtgttttttttcttctgctatgtgacttgcatcgtggagacagggcatttgagtttatatctctcatgcatattttatttaatccccaccctgggctctgggagcagcccgctgagtggactggagtggagcattggctgagagaccaggagggcactggagctgtcttgtccttgctggttttctggatggttcccagagggtttccatggggtaggaggatgggctcgcccaccagtgactttttctaagagctcccggcgtggtggaagaggggacaggtccctcacccacccacaatcctattctcgggctgagaaccctgcgtggggacagggctcgcctcaggaatgggctgtttttggcctaaccctcagaaacactggggctggcacaaactcttggtttcttcaacaggagaattttactgtgtttcttttggttccattgtttggagacattcctgggcacagtttggtccgttagaattaaaagttgaatttttttttttttt

SEQ ID NO: 16291 - DNA, 673 bp, Homo sapiens
ccaaggcccggggttggaggtgggagcttcccacacctgcctgcgttctccccatgaacttacatactaggtgccttttgtttttggctttcctggttctgtctagactggcctaggggccagggctttgggatgggaggccgggagaggatgtcttttttaaggctctgtgccttggtctctccttcctcttggctgagatagcagaggggctccccgggtctctcactgttgcagtggcctggccgttcagcctgtctcccccaacaccccgcctgcctcctggctcaggcccagcttattgtgtgcgctgcctggccaggccctgggtcttgccatgtgctgggtggtagatttcctcctcccagtgccttctgggaagggagagggcctctgcctgggacactgcgggacagagggtggctggagtgaattaaagcctttgttttttaaagaaatggcaaagccttcgactgacccttgaccccctgctccctcagcagagacggagggaggggctgctggtggtcagggacctgcactgtgtagagggagcctggctgtgtggcctggaacaagtccctccctccctgtgcgcctcaggtggcctgtctgtgagatgagaagaagaccagactgaagcctgttcaccatatgccaggcagtgctttct

SEQ ID NO: 16292 - DNA, 1800 bp, Homo sapiens
cggggggagggccgcccggcagtggactcgctgatcctgggccgcagcctggggtgtgcagccatctcattctgtgaatgtgccaacactaagctgtctcgagccaagctgtgaaaaccctagacgcacccgcagggagggtggggagagctggcaggcccagggcttgtcctgctgaccccagcagaccctcctgttggttccagcgaagaccacaggcattccttagggtccagggtcagcaggctccgggctcacatgtgtaaggacaggacattttctgcagtgcctgccaatagcgagcttggagcctggaggccggcttagttcttccatttcacccttgcagccagctgttggccacggcccctgccctctggtctgccgtgcatctccctgtgccctcttgctgcctgcctgtctgctgaggtaaggtgggaggagggctacagcccacatcccaccccctcgtccaatcccataatccatgatgaaaggtgaggtcacgtggcctcccaggcctgacttcccaacctacagcattgacgccaacttggctgtgaaggaagaggaaaggatctggccttgtggtcactggcatctgagccctgctgatggctggggctctcgggcatgcttgggagtgcagggggctcgggctgcctggcctggctgcacagaaggcaagtgctggggctcatggtgctctgagctggcctggaccctgtcaggatgggccccacctcagaaccaaactcactgtccccactgtggcatgagggcagtggagcaccatgtttgagggcgaagggcagagcgtttgtgtgttctggggagggaaggaaaaggtgttggaggccttaattatggactgttgggaaaagggttttgtccagaaggacaagccggacaaatgagcgacttctgtgcttccagaggaagacgagggagcaggagcttggctgactgctcagagtctgttctgacgccctgggggttcctgtccaaccccagcaggggcgcagcgggaccagccccacattccacttgtgtcactgcttggaacctatttattttgtatttatttgaacagagttatgtcctaactatttttatagatttgtttaattaatagcttgtcattttcaagttcattttttattcatatttatgttcatggttgattgtaccttcccaagcccgcccagtgggatgggaggaggaggagaaggggggccttgggccgctgcagtcacatctgtccagagaaattccttttgggactggaggcagaaaagcggccagaaggcagcagccctggctcctttcctttggcaggttggggaagggcttgcccccagccttaggatttcagggtttgactgggggcgtggagagagagggaggaacctcaataaccttgaaggtggaatccagttatttcctgcgctgcgagggtttctttatttcactcttttctgaatgtcaaggcagtgaggtgcctctcactgtgaatttgtggtgggcgggggctggaggagagggtgggggactggctccgtccctcccagccttctgctgcccttgcttaacaatgccggccaactggcgacctcacggttgcacttccattccaccagaatgacctgatgaggaaatcttcaataggatgcaaagatcaatgcaaaaattgttatatatgaacatataactggagtcgtcaaaaagcaaattaagaaagaattggacgttagaagttgtcatttaaagcagccttctaataaagttgtttcaaagctg

SEQ ID NO: 16293 - DNA, 145 bp, Homo sapiens
ggtgccgccagctgccgcaccagcccgaacaccattgagggagctgggagaccctccccacagtgccacccatgcagctgctccccaggccaccccgctgatggagccccaccttgtctgctaaataaacatgtgccctcaggcc

SEQ ID NO: 16294 - DNA, 313 bp, Homo sapiens
gctccaagagcccccaaccgggacccaaccctgcctccctgggctaggctctggcctgggcactcaccccctggcttagacaccttctcaagggctggccttcagggacccctggtgggtctgcctgcctgggccacccttcctgcctgggcctccccttggcctacctgggccagcccccaccacctggcatgccctcctggggccaagagtgggcctgcaacccacccacttgcctgcccacccaactcctgggcgctccccactctgcccaggccttgagtgtccacattaaatgggtctcccacaccgc

SEQ ID NO: 16295 - DNA, 595 bp, Homo sapiens
ccgatcgggtcaggcaagtccatcccgtcctgagagccccaggccccccttcgacctctaaacagatccctcctcttctcggagacctccctttccaagcctgcctggacggctgttctgtgacttgacagtggctcccccagccccaaagccagcccccttcatctgtgacttaatctgttgtagtggtgagctgatacattcaggtgtgaccgttggtgaaaacttgtgccccttctgtggtatgcccttgccctgttctataaatatctataaatactcatatatatacacacctacacatggccaaccgcctcgcctctagcgctgggaatcagtcactgtgctatccttgtggagtcttgtggcccaactaccagagaacgctgtcccccgacatcccactccaaagtgtgccacctccagtgagcctccttgtcatgcccggcctgtggacagccagcccccgccatccctcccaccccctaccaagcatgggggtgctgtgcaggcagccgtgtggcctgacagtttctaccagtcctgctgtccctcggctgagaataaaacccatttctggatgatggggaatgtc

SEQ ID NO: 16296 - DNA, 427 bp, Homo sapiens
gctcctgagccagcggggcctggcctacctcccccatcccctgcttcccttggaggcagagggctcccttgactacctttgttcctcttctttgaacactgacccttggacaacatttatcataatttgtcataaccactgctgagtggccttgaggacgaaccccgcagggagcaagcagtacagtggcattcccagggggaccagcagctacccaaggagaaccatgcatgaacagtatcagtcgtctgggctcatgctgggatgtcgcagtgctcctgttgcaactcctcccagccagccaggtttgctgggggccaggctgggtgtcctcacaggagtgagggctacacccaattccaaaagcctgagaagagagaagtggagggggaggcgagtgtgtgaataaaggctcccatcaggtcaa

SEQ ID NO: 16297 - DNA, 731 bp, Homo sapiens
ttccccccatccctctgagggccggcggatgctggatccggagccccaggttccgccccagagcggtcctggacaaggccagaccaaagcaagcagggcctggcacctccatcctgaggtgctgcccctccatccaaaactgccaagtgactcattgccttcccaacccttccagaggctttctgtgaaagtctcatgtccaagttccgtcttctgggctgggcaggccctctggttcccaggctgagactgacgggttttctcaggatgatgtcttgggtgagggtagggagaggacaaggggtcaccgagcccttcccagagagcagggagcttataaatggaaccagagcagaagtccccagactcaggaagtcaacagagtgggcagggacagtggtagcatccatctggtggccaaagagaatcgtagccccagagctgcccaagttcactgggctccacccccacctccaggaggggaggagaggacctgacatctgtaggtggcccctgatgccccatctacagcaggaggtcaggaccacgcccctggcctctccccactcccccatcctcctccctgggtggctgcctgattatccctcaggcagggcctctcagtccttgtgggtctgtgtcacctccatctcagtcttggcctggctatgaggggaggaggaatgggagagggggctcaggggccaataaactctgccttgagtcctcct

SEQ ID NO: 16298 - DNA, 999 bp, Homo sapiens
gggcccttctctgggcctgggcacccttagaggggagaacgaagcaatcagacatccccttgggccctgcttccaggtctccctgtcccccttgcctgccttcttccctgctctgtcccctaagctccctccaggcagggaaaagaggccaggtgctaaaaatgagcctttctcaagcacgtgagcagcggaaggcagacaggcgccagagcccagcactcccttttccagcagctgtggtgggggagggttcccctccagtttgtcaagagttgaaggaggctctgtggccaggtgacctggctgccttccactccttgtacctcagtctaaacatggagtggccgctgacaaggcgctccagccccagagccagcgtcttcatggggaagatgaatggacctgagtagctgaaggaaggcccctccctacccaaagactggaggcttctcagcctcaatttccctgtctgtacagctgagggctctgcctgtcccccactgctatcagtatggaaccccagctggggtcccctattgagtgccgactccccccaccgccagcagctgctcctccagccacacccctcctgctccccccacccctagcccttgaccctggctggcctgccccgctccacaggccaccagatgggctcctgagaccctccccaggctgcttacagctcattctgctgggggtagagatgaggggagggagtaagttaaaccttggactagcaagtagaagcctggggggatgcgtgtgcctcagtttcctcctccacaactgaatatagtggctgaaaactggggagatacttgatggcgcgaatgtccgttttctctcccttcccacctcctgcaggaagcaggacggggcaggcagcacctggtaggcacagtgctttgcccctcctccccttcccttctggaagtcttggggcctcagtgcttgcaacagccggccttgggcaaataaaagactaggttgtttact

SEQ ID NO: 16299 - DNA, 496 bp, Homo sapiens
gtccaggtgatgactgcaaagcagtgtccaggagcaggccactactgcccagagagcagaggaggaggttgttggcagggactgcagatcctgtcagacctggccaccaccttgggcatggccactctgccctctggacctgtctttcatcgggagaaaccactcagagatggatcccattccctaaaggtctcacagcaaaggagcaggactcccaggcccctgtaccctgcctggcctgattcagggccttgtggcccccagcttctgtttcaagctgggcagaccccaggatcccttccctccctaaggactcagctgaggggcccctctgcccccttctacctccacctcagcaccctcccccagcttgatgtttgggtctccccagcaccctcctccctggccggtgcaaagtacagggaggtaaagcaggacccttgcagacatgttgcccagcacacagtaggccctcaataaaagccatttgcacttt

SEQ ID NO: 16300 - DNA, 704 bp, Homo sapiens
ggccacttatcagggcctggagccctgatggaagccataggaactccagagttgccaagccatagctgagaagcctggtggttttcctctcccagtgaaaaaatgggttcagggtcttgtccttagctactagctctagaaaagtcccaaaagcagcagaaggtgaagcaggaagcacttggttttctccttcctgatatagtcacctgttggaagtgttaaaatttcctcgacaggccttaaatttactactacattagggtaccacattttaacttaccatgactttgctccttcctttcctgagaaaatatttccactggattttttccaccagtccccttacagccctcattgttttaggaatctctctcaggttttttctgacctaaaccagcaggaagtcgtcctgggctgtaagcaccatcacttgctttttttttttttctgatttcacaagtgtggtgttttcccaaggctcccttcccaagctcagtgcaaacctctcactcccaagtttctttgaggccacttgcccccaagcacttcacaatagaccctcgagggcttgtgtccatttggccttttacaagtgtaatgccaatttcattgatttttgtttcttttggcctgatttgtatctctggaatgcatttattcttgaaatatttgtgtgattttacaaaaagcttttgtaatcagtt

SEQ ID NO: 16301 - DNA, 102 bp, Homo sapiens
gctgcacgccccccaagggaggactacttcctttttcttggctgctgctttttaaaaggagtgagctatcatcagtgctgtgaaataaaagtctggtgtgcc

SEQ ID NO: 16302 - DNA, 1130 bp, Homo sapiens
tgtcactccatcacccaccatcaccgctgctgcaaagaggcaataataaaggaactgaagacagctgtatttgggagaagtcatgtcagattcagaaatttgccattatgtatttttatgtatttatgccttgtgactaggagaggagattttcatgggtcacaaaattcttggaggtcccttagtagatttggtagttccttaagagatccacgtgataaaataaatggagttggcctttcttgttttttgcaaaagtgataaaaggtctttagcacttggtctcctcccttgtctctagtgtctttcagaaagttggcaataccttaacaaatgcactctgagctggagggagcccaccatttgcacccacctacccaccctcacccctgttcagatgaatttccagaaagagctaaggctcataaggttcccttttaagtattatttaatagttgaggccagatacttacatgcaagtctgggttatggttgttttgcctttctcagcttgtgaagtcattctaaagctagaggaagtatgtgatatacacatggactaaggctcaggtgacactatggctagattaacatctgggattaggactggaaacacatgtcattttgaactaagggaaactctttgtcatcctaatttggaatttggtccctggatggctagggatccatgaaccaggcaggtaccttttttgtttttgttttgttttgtttcttttctgtttgaattaagatgggctaagatggggcttgcaacattaaacatgagctgagcatccataagcattgaattgggattaaataaagatgttgggcaggaactgaacactgctaatatgatgataaatatgcctgactaaagccactacagaaatccagagattggctgttaaaatttgttttgtggaaagactaattctctttgatactgcagaggcagtggccatggatctgttcctctgtgctaaatgtcttgtggcagggtgtgtttgtgggggagtgttcactggtactcttgagtggcctgaagtgacccattctatgaattgttaattaaggtgccaaaaaaaattaataataaagcttggttttttgaaaaacccattgctgat

SEQ ID NO: 16303 - DNA, 161 bp, Homo sapiens
gcagacagcaggggattaagtaactcataaccaggcctcagatacccaagggtgctattacctgctggttttgattcaagttaaaaacacctgtactaagtatgacatctttcctactccagtccctctcgttgatatttgaataaatgcttttgaacctt

SEQ ID NO: 16304 - DNA, 327 bp, Homo sapiens
gccactccctgggtcacccacccctcgctgcttgccctgcgtcgccttgctgcatgtccgctcctctgtgtgctctcactttccactgtaaccttaagcctgcttagcttggaataagacttaggagaaaatggtgcttcactaacccgcttccggtccagtcacaatcatcatgtcactgtggggacccagatctgtgtcttgaagcagctgccctcattccgacttcagaaaatcgaagcagctggctcctccccttgttctctctcccaccctcccccaaatctgttttcatgtaaaagacaaataaatgatgacttcccccaa

SEQ ID NO: 16305 - DNA, 1724 bp, Homo sapiens
atagaacactgatggattccaaccttcctttttttaaattttctccagtccctgggagcaagttgcagtcttttttttttttttttttttttttccctcttgtgctcagtcgccctgttcttgaggtctcttttctctactccatggttctcaatttatttggggggaaataccttgagcagaatacaatgggaaaagagtctctacccctttctgttcgaagttcatttttatcccttcctgtctgaacaaaaactgtatggaatcaacaccaccgagctctgtgggaaaaaagaaaaacctgctcccttcgctctgctggaagctggagggtgctaggcccctgtgtagtagtgcatagaattctagcttttttcctcctttctctgtatattgggctcagagagtacactgtgtctctatgtgaatatggacagttagcatttaccaacatgtatctgtctactttctcttgtttaaaaaaagaaaaaaaaacttaaaaaaatggggttatagaaggtcagcaaagggtgggtttgagatgtttgggtgggttaagtgggcattttgacaacatggcttctcctttggcatgtttaattgtgatatttgacagacatccttgcagtttaagatgacacttttaaaataaattctctcctaatgatgacttgagccctgccactcaatgggagaatcagcagaacctgtaggatcttatttggaattgacattctctattgtaattttgttcctgtttatttttaaattttctttttgtttcactggaaaggaaagatgatgctcagttttaaacgttaaaagtgtacaagttgctttgttacaataaaactaaatgtgtacacaaaggatttgatgcttttctctcagcataggtatgcttactatgaccttccaagtttgacttgtataacatcactgtcaaactttgtcaccctaacttcgtattttttgatacgcactttgcaggatgacctcagggctatgtggattgagtaatgggatttgaatcaatgtattaatatctccatagctgggaaacgtgggttcaatttgccattggtttctgaaagtattcacatcatttgggataccagatagctcaatactctctgagtacattgtgcccttgatttttatctccaagtggcagtttttaaaattggccttttacctggatataaattaattgtgcctgccaccaccatccaacagacctggtgctctaatgccaagttatacacgggacagttgctggcatgtcttcattggctatataaaatgtggccaagaagataggctctcagtaagaagtctgatggtgagcagtaactgtccctgctttctggtataaagctctcaaatgtgaccatgtgaatctgggtgggataatggactcagctctgtctgctcaatgccattgtgcagagaagcaccctaatgcataagctttttaatgctgtaaaatatagtcgctgaaattaaatgccactttttcagaggtgaattaatggacagtctggtgaacttcaaaagctttttgatgtataaaacttgataaatggaactattccatcaataggcaaaagtgtaacaacctatctagatggatagtatgtaatttctgcacaggtctctgtttagtaaatacatcactgtataccgatcaggaatcttgctccaataaaggaacataaagattt

SEQ ID NO: 16306 - DNA, 313 bp, Homo sapiens
gggcatctcctggcacctctgtccccttcccccacagactgttagagcctctgctcgttcacccgtgcgccctgcctggaggtccaggccttgctgggtacttctgagcccttgggattcaaagtggcagccatggggccactgttgtgggctttgctcagtgtcactgggcaaagtgtgtcccttccccctccagctcgccctcttctacctcccagcgagacctggcccagaaagggtgccgcagcaaggagtgatatggtttgtctttttaagactggacttgctttatattaaatttgtaaaagtgtgc

SEQ ID NO: 16307 - DNA, 2552 bp, Homo sapiens
cccggcggcaagaggcccatgttccggagagaagcctcccgaccctgtgccctggctcccgggacacatagaaacctgtaggaacccagcctgaggggaagccacaggatcggcccgagacccaggccatgcccactggggacacactgtgccgtgctccttctgccgccacgcccagctccccacctgccctgcactctgccctctttgcccaggatactgaggagggctggagctcgggaagttgtccttcctgggccagggccgtttctggcactgggaggctggcaggggcccctccctgcctcggctctgccgccccagcctcagttcctgcttctggtcttctcctgggctccactcaggggaggtgcttggccaatgggccagaaaccgcttctgagcggggcacttcggctgctccacagggaaggcgacactgaaagctgagtcctgccgtctgtctcacccacagatgtctgtagtcggtcggtgtgaatgtgggcccaagtccccaggcatcttctccgtgtgtgtgtgtgtgtgtgtgtgtgtgtgtgtgtgtgtgtgtgtgtgttagggagtgagggtctctcaggcctccaggtctcccagcccctccttctctgtctctacctctctgcctgtctccttccacctccttcccagagtgggactgtgtcttgcttcatgattcctctctccattactctccctgcccttctctgttggggtgccttatcctgagccacctcctctccccgcttgcctctgctcccctgaacctgggagacagatgaggagactggctcagcaaggcccctggaggtcaagcttggcctttgcctcctgttcccatcccccagccctggctcctaggtcctcccaactgggagggagtcctccgtgcctcacttagagggttctgaacccgttccctacacagaaatcttggaaaccaaatgctgctgagtaaggatgaagctttgagcctcctgcccctgctttctgcccagggagggagaaggaagagggggagctggtttttctggaggttcccccagaggccctcctgtccgaaaagaaaaggaccttgattctgagcccagggtcggaacccattgcttcagaagagttgtcattccctcggcttccaggtcccaacccagggttgggttgagtgagtcccacaaagggcaagtggggcccgaggaagcctctctggggccaggggtagctgagcttaaaggccctgggtcctgccagttccaggagggccatgtctgtgcctctgtgtacccctccacccgctgcgggctgagggaggtgcagggccttctctgacccctgcctgagctgttcccagggctggagcaggtgtaccctgagcaggggcagctggccactcccagttctcaccaagtcacctccctccttgtacaaggtttgcgtccggaagccgggtgccatagtgaggaccctcgtcctccagactggctggcaggagtcaggccccagcagccctcctgcccccaaagctttccgagtctggtgggcaggacttctcgctgcccttccaagcccggctttgggccaggaaaggcttccccaggtggctcttctaccaggcttttcctttgatgccgcctggatttccgcacctgcctgtctcctctcccagagcacagtatttgggagactttgactatttattcagactcctggctatgtattgcacattggcaagtgctctggggatgaggcatgggtataggaagggagaaaggagttggagacaagatcctcttcattttccaagatcaaagtcagcctcttctccccatgcttctaggaactgcctggttttcgagcaggtcctggctgagcgggctctgagttctgtactggaattgagtgtaaagatgggaagagaactgggctgactccaggacctccaggatgaggcagaggcatgatgcttcctgctcacctgggccaccctctctccaggacttgtcagctggtggttcagccccttctccaaccccttcataagcttgggccactgcctgggacccagcagacactgcccaggactctttagtgcactcactcttgtctgccccctaccttccctcctggaaccacactacttgaatcaccattactttgcctcgctggcagagttgggtcaagtgccctctccttgaccttgagatgaaggtcaagagcacagggaccaggccttggttaggctgagctcccagcaggacaccgcctgcagaaaggacctgccctgataatgtcccttccccagattctcaagcagatgcccaagggaggtccccacagagccagagtgcctgaggcttcctgcttgagaacctgccccctggatcttggacacttacagattgagctgtatgaattcagcgggtctcactccagagggtcagaacgtttgctttagttttttcatctgttttgttccttgagtcagtgctgttgatgacgagttgtcttgaataaatcatgtgttctttgcaatgggc

SEQ ID NO: 16308 - DNA, 65 bp, Homo sapiens
gggtggagcccagtgagactgtgggtgtgtgcaggccggggagtattaaaggtggtgatttttgg

SEQ ID NO: 16309 - DNA, 1665 bp, Homo sapiens
gcgaggccggcccagcacagcaagcagcaggaccgctgcccagtcctcaggcccggaggggcaggcctagcttctcccagaactcccggacagccaggacagcctcgtggctgggcaggagcctggggccgcttgtgagtcaggccagagcgagaggacagtatctgtggggctggccccttttctccctctgagactcacgtcccccagggcaagtgcttgtggaggagagcaagtctcaagagcgcagtatttggataatcagggtctcctccctggaggccagctctgccccaggggctgagctgccaccagaggtcctgggaccctcactttagttcttggtatttatttttctccatctcccacctccttcatccagataacttatacattcccaagaaagttcagcccagatggaaggtgttcagggaaaggtgggctgccttttccccttgtccttatttagcgatgccgccgggcatttaacacccacctggacttcagcagagtggtccggggcgaaccagccatgggacggtcacccagcagtgccgggctgggctctgcggtgcggtccacgggagagcaggcctccagctggaaaggccaggcctggagcttgcctcttcagtatttgtggcagttttagttttttgtttttttttttttaatcaaaaaacaatttttttaaaaaaaaagctttgaaaatggatggtttgggtattaaaaagaaaaaaaaaacttaaaaaaaaaaagacactaacggccagtgagttggagtctcagggcagggtggcagtttcccttgagcaaagcagccagacgttgaactgtgtttcctttccctgggcgcagggtgcagggtgtcttccggatctggtgtgaccttggtccaggagttctatttgttcctggggagggaggtttttttgtttgttttttgggtttttttggtgtcttgttttctttctcctccatgtgtcttggcaggcactcatttctgtggctgtcggccagagggaatgttctggagctgccaaggagggaggagactcgggttggctaatccccggatgaacggtgctccattcgcacctcccctcctcgtgcctgccctgcctctccacgcacagtgttaaggagccaagaggagccacttcgcccagactttgtttccccaccgcctgcggcatgggtgtgtccagtgccaccgctggcctccgctgcttccatcagccctgtcaccacctggtccttcatgaagagcagacacttagaggctggtcgggaatggggaggtcgcccctgggagggcaggcgttggttccaagccggttcccgtccctggcgcctggagtgcacacagcccagtcggcacctggtggctggaagccaccctgctttagatcactcgggtccccaccttagaagggtccccgccttagatcaatcacgtggacactaaggcacgttttagagtctcttgtcttaatgattatgtccatccgtctgtccgtccatttgtgttttctgcgtcgtgtcattggatataatcctcagaaataatgcacactagcctctgacaaccatgaagcaaaaatccgttacatgtgggtctgaacttgtagactcggtcacagtatcaaataaaatctataacag

SEQ ID NO: 16310 - DNA, 288 bp, Homo sapiens
agctgtgggctgtaaacaccagtgccttgctcagcctcctggttgcaacagggaggtcttgtctcccctcctgggctttcctcctgccctgtgggcagcagcctaggctgggtcaggggcttccctaagatcttcacctctctgcctccctactgccccaacatagccttgaggaggcttctcagccaccaaagggttctggccccttctcactctcctctcctctcagatggaactctggttattatggtgttagttatcgaataaaaacgacttcagaatgcagct

SEQ ID NO: 16311 - DNA, 417 bp, Homo sapiens
ggcagtgctgttctgcccacctacccctctccaccagcctacactgcaccctggctggcaggggtgctgctggctgctagggcctatacaatggagggcacctcctgtcacccccctcccggagtagccacgactccagccaccacccactgacgttatttttatactagatgaagaggtcaacagcaggcatggggagccgagtcttctgtgctcaggtcctcacgctgcagacgccccctagaggaactttccttcctttccagcattccccacagcactgccggccaggggagaggcggcagcccagcagagggctctatgcacgggtttcaaacctgttttccacactctgtctttgcagttttggtaattctgtggtctatttatacagatattaaaatcttgtttatagac

SEQ ID NO: 16312 - DNA, 1618 bp, Homo sapiens
aggcggcacgggctggggggtggcagagagaaggctcctcctcccttccctgggttggtatctgacagctgtggtggctgagggccgttgcccctgactttgccccacccccatcatctgggagtccccaaggcccagaggggacatttccatggagaagaacggttcctgggggaagcagaggccaggaccagtggggcctgtgggagagaaaggctgtgagagagggggttgttgtggagaattgggacaggcagagccaggatgccccaggtgggggaccccaaaacctcccatcgctccagggctgctgacaagggtgctgggagggtggaggtgaaggatggggcctagagccctgtggtgaaggtcacagtgtcctgagctagaagccacctgtggctatatggtctcagcatccagctggcctgtcctgatgccctccccacctcaaccgccttctcagagagtttgcaactccagagaaggagagtggggccaccttagtgggcagcaggcctgggccatccagagatggggcagaggtgggcctcccactcctgtgctctcttctgagcaggaactgggcccttgacagtgtcctttgacattccctcgccctaccaaagatcgtcttttctcctcccacctctgtcaccaccaaagacgggcggaggtggggctgggccctcctgcccccgcccatcccccttccatgagcccagacctccctgggtggtgctaggctctgagctgggggctcagaccagggatcgctcaggcccctgtcacctgtgggcccggggaccacttgggggaggtcagaggatgtatgtggccggaccagcttccccaccttcattaggacaagaaactgcccagcactttgccttcagttcaacgcacaaacgctcctggggcctcatgggggcagagcctcccctgggcctgcagagagtcctgttagcagcgacgtccccccgccgcggggtcctgtcagcccggcagtgtcttctcagtgtcttcacctgagcgagtgtctgtggccccaacgcgttctgctgtggctctgccctttccaggttgagaggcctgcaggagaaacacactcccctcctgggtttccacactcaggaggtcagaggactggctcctgtgaccagggcccctctcccctgaatgggaaaggggtctggggatgggagggcgcaccacagagaggagatgatgctgggtgtggcccatcttctgtgggccccttcccagacaccggatccatgggcactaacccgcctcccaggctgatgcccggaggcagcttcctgggcaggagggttccatgggcactaacccacctcccaggctgatgcctggaggcagcctccagggcaggaaggaccctgtgctccccgccccccatcctgacatcctgttcttttgcacttaccctgtgctgtgaatgtaacagtgggccttggccccgcccactctgatttgcattttcatttgtgtttgtttacacatccatgcactgcctgtagcagtcgattgtcacagcttcgacttttggatggtagagtgtgtgcactgactgtgagtcgaataaacaattgagacg

SEQ ID NO: 16313 - DNA, 1430 bp, Homo sapiens
ccagtgggtgtggctgggtccagcctccagatctggcccgcacgatgccttgcaggatggacaggatgacagacagggacgaagcagagacctctacagacccaagtcaccaagtggagcctttttttttcttattttaattttaatgaacaaggtggaccaaagggctgaaccagcccctcaaccaggaccctggggggcctgctgcctgggggccgtggccagagaccctcgctgtgctgctgccagcccctggctgggcagaaagtgccctcggcatgggcacctgggtgtggggtggaggaggagggctcgcgcctctggtctcggggccaggaattccaggtggcgtgagaagtacacactatttattttttggttttgtcagaggcaggcaggattttggagctggaagaatctgctctccggtggctgccctgtgaacagagggctcccggtcagcttcccaggcccttcgccctatgcccagagggcagactgcctctccctgggccggggtggcctgggtgccaggaggaggggagcataccccacaccctccctgccaccgttgccgttccagaacctcggtcagtgtttccctgtctgggggcagggcccagagcgagcacgcgtctggcggctgctgtcgttgtgttctaccccgtactgacccaacaccacaagggctttctctggtcccctgtccctaagacaataatcgctttctgacaaaggagcctgcacatttgggtgagcagacccaagctgtttacagctctttcttgtcctgccatccagtagcagttagtcttcatccccacgtgaacaaaatgggaaggagccgtgaggagaggagtgaggcaacaggcacccgaagtccctcgtccttccctctgtgtgctctgaatatgtccttgtccttcctgacccatctctgaccagctgggaacctgcttggggtccccctcaaacctgtgtctggggtgtgggctcacagatccctatcagcctggttcgtgggagggctcttcctaaagggacccccatctctaagtcactctgaaagggagttgtggagaggagacgcctccagactctcagaagttttgaggactgaactgggtcactcgggatctgtgttcgaatcctccccacccctttctttgtggagtttcctaacctgctgctgaagcacaatgttttggtgctttcttttctcatttgttaaaggcagtgtccaaaagccattccagatgccaagaccaggggcttatttctagggaaggtaggtcggtttccatgtttccctcccgttatttttattttttactttttgcctgagacaagccgagtatgaggtggtttgatttaagaaaaatcaatgaaattgtttactactgttttaaaataaaaccgtaaactctggc

SEQ ID NO: 16314 - DNA, 1480 bp, Homo sapiens
gaggggccaagccgaagagccacccaggccacagttcctgtgcctgccttccccaccccagcagtggcccctccccatcccctccctctgttcgtcccgtttgatgagaggctgtttactggggtggggtggcgagatgggcttgagggggctcagagcataaggcttcagggcccaagttgggagaagtgaccaaagtgtagccagttttctgagttcccgtgtgctagactggccagaagagagggtctggggcctggtcactcggccactctctcctgtttctggcctcttctcccttcactcccgtccagtctggttttgagagcaggggctgttctgcagcaccgcagggaagggaggagagatacctgctgcttccattgcttttcccttcctggagtcgatgcctttctaagggttggagctgctccttgcaggggcgggtcagtttcccaggccatgccggggtggccatctatggtagggctggaagctgaggctggccgccagctgtgggctggggtggggtgggtggggtcgggtggtggagaggccttagctgtcctggctggtgcccctcccaggctccttttcaccctgccccctgggcctgaggccccctgtgtccaagcctccccctggctcttcagttctctagcccttggctctgctgggtttcctgactgtagccacatctctcccgctccctaagggtaacctagccaatggaagctgccctttgggtaggtgctgggctcctgggagggcccagatgatggggtgaggcatgtctttccagaactttccctggcagggaggggatggcagaaactcagggaggggcttggggcccattgtatctggagagcctggattcctcttggcagtcttaggcccggccacttctgctacctttgcgctgctgtgagcctcaccctgggcccctgggccctgcttctctgctcccctgggtgatgggtgggcccagaaggtggcagtcccacaccttgtcctcccacctccctgaactgtccattgcttttatagggtgaggtaagagacagcctcccaagcccaggctttggcactcagaatgggcccagtgggggctgggcaggcccattgagggccaccgccgaggtttctcctagggctgttcctgggcctggctcttacaggctcgtcccccaggcctgcccttctccactgccccctcctgtgtctgggtccacacacccttcaggaagggggagcactgagaagcacagcacaggggctcagcctgggatccggtgatggtctgggcagaggctgggtcaggagtcccaaaggtcagtgacagtttctcagaagaggcccagcgtccacctctctcccagggccagacagcccttcctggctcccccatccccctatgggctcccagccccttgcaccctcattgctgttcagattaaagcctctgttttgcacctgt

SEQ ID NO: 16315 - DNA, 91 bp, Homo sapiens
gcggtgggacctagaaaacacatactgacctataggaggcactgcccagagctcctaactggggtggggtgcaaaggaaaggtgggtgagg

SEQ ID NO: 16316 - DNA, 136 bp, Homo sapiens
gccggggctggcaggagaaactgaggaaccacagtcctggtggggggagctggcagctgggcaagatccaggcgccacgctggcggttcgtgagtgtcgaggcaccactaaatatagctgtctgccgtccactcat

SEQ ID NO: 16317 - DNA, 318 bp, Homo sapiens
agtccagtcccaccaggacccagacgcctccctgggtggacagcaatagaaaagggggcagacgcccaggaagtgaccttctcctggatgagctctcctggcccgtctgtccagcctggactcccgagcccacgaggctgttgaggcccctgcagccgggcccagctcttctgtccttggccaccagagactgcagcccacaacccttggaggggttgggccggaaggtggaagagcctgccaaggacctcatttagtttgtgtattaaaaccaaaaagcttttgtctttaagaaataaaaccatttttttaagcccc

SEQ ID NO: 16318 - DNA, 1698 bp, Homo sapiens
gctcctatccagatggggtaggagacagctgggaggctccgcacgccagaggccttgcctttcagaagaaccctgaagaccgctttggggttttgcctgtttgcaccttagacttttgggtatagaatcttttttttgagaagaggtctcactccgtcatccaagctggagtgcagtggtgcaatcctcaactcactgcaacctccgctcccggtttgagtgattctcatgcctcagcctcccgagtagctgggattacaggcatgagccactgtgcccagctgggatatagaatctaagagttgattgtggaaaacacgtgaatctattgcgcgcatttgtcatttagcaagatggcagcagtccagctgttctttgcagctggagatgaacttttaaaaatccccttcacacttaatgtactgaccgagacagaagtacctgaaaacagctgtgcatggcaggcccggcaatagcttctgacccacagcacccgcgcctcagaagctacggtcacaactaaaggagtccagggacttgctgcaggctggggggcactgggtggttctcaccagcaggctgcggggcactgtgttctcattggccaaaaacatccttttgctctgtctcgttctttacacagagttcactgacttgaagtatactcagttaaaatcggggctggaggtgcagacggtgtctgaccggaggatgtggccgtgcccgccgagcactcttgatctgagctgacctgtgtgtgtgtgtgtgggggggtggggccttcacctaagacctctgcagcagacctggacagacaggcccctcccgcctgtccatcgctctagctgctaatacagccctggctgtggaatccttcaccgtctcagctggtatcagccccagcctgccttgtgccatatctcagcttggatctctgctagagtccccccaaccatatatcatagagttgaatcacaatgagaccgttggctttgaatttgagtcgttggttcccatggtgagatgcttgttaagactttatacttgggtcaatctctcactttattttgtagaaccatttgaaatcctaggatgtgcttgttctggaaggatgacatgggcccagactgaacaagtcagcttgatgatcttaaatgatggaagtataggacgttgcttattttaaaacaagggaaggacacaaaatggaatgactgcttagtcctttctcagatactcttaaaacaattttttattgttaaatttgtggtaatacatggtcacaaccgtggatcaaacaaggtcagtctaaagtggcaggtcctaggtgtgacctgataccaccaccctttgtggcagcaccgggctggactgccctgatccctgggacgtgagacttagcttccagccagtgtgaatcattgtatctgtctcataatcacagcacagctgcagacacaacaacgtgcagcattttttacataaaaatatggtagaattaatttatgacatggaaatgccttacgtggtatcacacttagtcttgaaaaaaacaccaaggtgacgtttaaaatttttagtacatatcctcaaattggagctaagttatacttcttttataaccttttgggcatctggtcgagagaagacaagattttctctatttacagtgaggcaataaatatgtttgccaccttt

SEQ ID NO: 16319 - DNA, 1555 bp, Homo sapiens
tctgctgggctagtctgtaagtcgccccggctggtccctccatggcactctgggtcctctcctcactctccagagaccctcacatgtccttttgaacatccaaagagcaggtccctgaaagcaccttcctggaggatgtgggagggccctggacatggcccggccccactgctgagtgcccgtgtccccacagccccatgtgccccaccccgcggaaggcgtgtttgtgcccagaagagaggccgggctgctgcagaaccccgccgtgtaaagaggcagaaaagttggtttggtttgcagtaacgctgcaactagaaaatatatgcacttcaggcttgttgaaacgaccaagactctgtgacgttaatttgggtctttgtcctggcagtgcctctgccagtcactgtcatcgttgtgtcccccacaactgtcctcttgctagctcggcccagctttgtccctggagcccgatgctacccctgtcagacagaggctgcggcctgggccagagtcagggagtagctgctgcttcacggcgtctccactgtgcgattggcccggagccccgaagactcggagggagctgctcagggccggtgagcgcagccagaagccctggccagtgaggagctcacaggtcctccctggtggtcccgccgcacctctgcatctcctgggcgtcaccaggaaggctctgaagtcccgggctgctctcagcacttctcctgcagactgaagactctggactcattgctgattggaacaccaggaggaggttggatttctgccagtgggggatgtttctggaggcagctggtcccccacaccgcgtcctgctgagcctgccccctggattggctgtaatttgcctcgaagttcagcagttcatcttcatgggaaatttgctgagcccccaccagggaaccggatgatgaaacagggatacctcacagcttggccatttgaggcaaaggcagcttcccgagctgatgctaaagaagacagactttcccttcctcccagcagcagcagtgcagagcccacctggagggatgtgggggctgtgcagggtgcagcgctcaggtggatcctgggaagcagcctctggatgctgagtggagggagccactgagcacagcaaggcaccaaagcccctggagaaaccgccagggcgaggtgcgaccatcatcaggatcaaagcagacggggcgtgggtggggaaggggctctgggaccagaccccccacactactgcgtctttgtttctatcagtctttgtagaagcaggtggtggtggaaattccagcaggtgggtcccgcagaggccctgaggcctcacttttcggatcttctgtcccagatcctgctccctccctgctgagcctggggttcccctggcattggccccagccttctgaaagccggcgctgcagccagaggccgcacgctgcactgtcgcgacgcagagaggcttctgtgcaggctgggatcgggccccatgtctgtgctgtctagtttgtgttcaaaatgtcagaataaacacagaataaatgtt

SEQ ID NO: 16320 - DNA, 5041 bp, Homo sapiens
cagagccgaccctgaggatggcactgtccaaggaaactgttaacttattcatagtcctattggacagcaggagcagctcctacagtgaactattggcaccaccgacagtgacaccagggcacatggctggagcacagtgccgcggaaacctgattttgtactctcttttatggaaacgatctgtggctgtttagaggcagctggatcctctttcaggcgggaatgggagggcgggcacagggaggaggagaggaagagaaaaggaagaattcatttttaatttaggtttctttttttcttcttcatttcggagctctaaggtgtatgcagttgtgaccccatgtgtggggaagtgtagcaaggacggctggtggagggggaaggagggtgcgaggtgtctgtctgatgctttaggaaatgtctactgaggaccctgggacttaagaagaagggcggggagagtgccattgcctgtttgggagacaaaaatgaacgaaaacaggtgactttggaaagcaaagtcaaaacccagtttaggatgtagcacctgccccaggattcctgccctcggctttgccccagacccttattccagatgctgagagtgaccaggacagcagctcctgaggcccagtggtcttctttccaacaggaaaagaaggctgtgatgtcgctgtcaggatcatgccctgtggcacagcacaggtggtgggaggtggttttctgactgagatgttgcctgatggatggaaagaaatgtatttttaagttcaaaaagcattatcctgtggcgttgcctggacatccactccctgacagcccagagcagcactgtctggcttcccttcatgcttgtggctttgttgtgtttgatcagaattttgggggaaatggaaagttttcctcaaggagcagctgggggcagaataggtagtatttaagcaaatacttaagtccaagcaaatcatccccattaaaaagcttttcctgtaggctagtaggatttctaaatagatgaattcaacagacttggtccccatagtccaagagtatgtatgtgaagaaagtgagcatgattcaacagtttcactctcagggattttaggatggcaaaatacttcacagaaactcaatgattaagttcccttccacacttccagagcttgaatgaacacaggtagccacctaaattgagcagtattgcaactcagagagaaaatcatctgaatagtaggacaagctcagaaggtacattgtgactgagggcttaaaaggagaccaaaacatggccccatcagggaagcttcttaatgcttggggggccagctaggtagggttgcttccaaaagctggagcccacccctgcctaggggttgtcagagagccacacctgcaggggaacaggtacctccgagggtgagagtcgtggtctctgggagttgttttctcacctctggcttagaagggtcaggcagaaaccacaggatgtggggtcacactcactgtcccaagtttgggaacctgaaaaagtctccattcagaacatggttgttctccctgtcccatgctatcttatcttcctaaatgactaatgaggaagcgggtgttctttttctgcactttgattcgccatctgggttctgtagggtgctctgaaggtgtgatctgccttctggctgatgtggaggaagagcaagcgccttcccaggccacagctgctcacctctcggcagatattttaggcaagcatccgtgtgtcttcccatcttcaggagaaaggtaaatgcaccctaagtgttcacttctggacctttttcaagttcacttgggactgtgtgacagaagggagttggagggaggatgggaatatttttaacactttgttttcctgtgcagaaacataataccagttttcgcagaaatgtgtctcaatctgtgactaccaaagccctcctcagtccttccctcagagggacacatttgctgtttctcccgcaagcagatgttgtggatgaggcgatagactccttggcaagaacgaaaggtgtgatgaaacctccctgctcggaagggtctccgtggaggtgtcctcatttcacatgctgggttttgcaagcgaggaagccaggcagtggaggaactagagagaggcaggcgtgtgtgtggacaagcgctggagccgcagccctcagactggcacgggaacgccagcgttgggtgttcagattccacgcgtatgtctgggctcactcacagcatggccgagtgtctgcagtgctggtcctgacccttccagagcagcagtggacagatgagataagactgtttcagaaacaaagatggccacagccttcctaacaagcaggtcatctggccatgtctgtattgtaactggtaaaaggcttcaagtcagattgatgatcaagaaaagtcaaaaccccagcccaagattgggaaagcaggtggtggttccaagcttttaaaaaattattgaagctctccatcctgttctgtgagtgtgtcttctctttctccttcacgtcatagccgtgacccaccgttcatctctgctcttgcgtaaagatgaccgatggagtccaaagccaagtggcttcaccagctgacaagccaccctcctgcagcctgagtttcacagtccactgggttcgttgtcatgcggtgtttgaatggttaagcccttgcagtatttcagatcgggcaaaaaatatcggatgcacatagcagaaccattggtggtatttatagctttgctttgtactcctcactgtttctgcctacgcaaaatatccatgtttcctctgagaaatctgttgtggactgaaagcgctgctggctgtgaaatttaataaagtgtgtatgctttgctagaaaattatttcttggacaataggaacagtcattgatctgtaaatcctggctcttaacagtgagtggccaaggacttgatcagcccatttcttggtccctcagtgctttaaaatttaagtagcactgcattttgtaatgttgaatatgactctagtgacttgtaggaggcacttgtgaggagatgcttgcttcagtgtaaaagatgctcatggcctgagtcagttgagttttctttcaagaaaccacttcagagtgaaatatccagggtttccccgccctggacatgtccagcctgcccaggcagcacacagccctgtaagtccacctcgtgtgggtgagatttcctcctgcgtgatgacctcatcgccatctctgctgtctcattccacagcctccctccctcttctctcctcctctgccctcgcccttcccccttccccatcccctccccctcctcctctgccctcgcccttacccctcccccttccccttccgctcctcctccctcctccacctctttctcctcctccttccctcctcctccctcctcttcccttctctgccatctttctccccgtgcctattgatcccacataggctcattctgggtacaccggctaaaggctttggtgcattgcagcgttttctcccagcagctgtgtgaaagatgcattttctaagctaaggagaattttctcaagagtggcatactcatgccaaatattattgctctgggccatataggctggtcttcctccacactaaaatgggtgtcttgttttggtacttaaaacagtctactccaggcatccagtccttacagaccaaggaagagcatagcgatgcctgttggaattgcagatgcattctggccttctcccccgtcctgaaacattttctttgaggaaggctcttagaacattagatagtctgctgaggttgttggcccagctccatacacccagtagaacagtggaacaactcatgcttcatgctgccaagctgctgtacttcaaaggaaacagatctagcacactgctgcacccctgcttccacactccacacttcaccccgctgcttttctctgacccgcccctggccttgtaagactcacgtaagctaagtccaggatgcctgtggcctgcggcttgattcttccctttaggattcagcaagttaatggcttcctcgctatagaagtgagactttgacttgatgcctcttggtatatcaaaaagatattcatccagaaagtaccaaatgttctgaaagacccgctcttcactccagttttccctagggtgtttctggcagggcgtttttaaaaggcatctacctgagttgacgctaatacttgtcaccacctggaacgtagttatcggtcggcaggctgaacatactccagattccccagaggccacttctgtagcccagcgatgcatctgagcctctctgcgtggtttatgcttgaaaaatagataatgcttttagatggttcactgccaggccatgggccccacacatctcaggccctgtgtgagggagcacactgagatggtgcaggagtgaatgggcatggcttggcctcgctacctcggggacctgttggagttctggcagcagggtgtctgcaggtgggacggcgttctgggcagagtcagaatggtcagaatgaaacagaacagccaactcacccacaggacagcttattttgaggcaaggttttggattttggaggaagcagccagatgaggcggtgagcctccagaaggtcagcctttggagcacgtaagatactgttacagggtccagaaatcgtgttcacatgggggctttgactcttcaaacagcttttgcagatcgtaaattgcatttgcctagtcgtgtgacctcaaaagaagtcagacatatttaatccagaaatagtttcgtttgagggagggcttgcaggtctgtaaatagcatttgctttcctggttagagattgggatgcagaaggagttttcagtattttttttaaaacactaatgatcattgaagagtatttatgtaaacatacaacgtataatgggtgggggatccgatcatggtgatgtacggggtgaattctcttgccgtgttgcaaatgtgtaaaataaagattatctggcag

SEQ ID NO: 16321 - DNA, 3635 bp, Homo sapiens
atgcctgggaaccactcacctccttctgtgccatgaggccacctcagccctgacaccaaccccgtgcgtccacccagccttcttccgcatccacacacagccggctgcccttgacccgggaggccccggctctcctctcccctgtcctgcacccatcccccgcctgaagccaccggctccaattgccagcaacctctgcttgtccggaaaacgacaacacgaaatggaaaaggctacagccctctgcataaaccaaggacttggctgcctcgcaggcagcctccgttcctcccgctctcttgcgcgtgtgcttttgttttttattttgaacagacgttttaaaagaaaaaaaaacaactaccttctgtcctagaagacacagactgacagatggggtgaaggcctggggacctcagagaactctgccttgccctcgtccctcgtccttcggcagccggagaggctgtgggtgggccgagggtgtctaggggttctgcctggtcaacgttatttgtcgtcccatcttttggcagcaaaaccacctgcgtggctaggatgattaattatgaggatgatgattttttttgtgataacagtattgtgctttttgtggggaaagtgaggtttttttttatatacatatataattgatatctttaatttattggttgttaactgttgctgctgcctggtgtgtcctcagctcccagggctgcgggcccaccgtttacatgtgcacgccctgacccacctgcccacgccgacttgggaggatggtggcctgcagcggccaagaagccaaaaaaaattttttttttttcagatactgtgcttgatttttggagaggggagaggtggaaattcctaaatggctaatgcactgttccctccagcccgaatgcctcctgccaaaccccttttccctgctgcctctgtccccgcatccttgttctcccctgggtccgtaacattttttccgaggatgaacaggggacatctttaggtttctcaactcttgctttggtgtttgccgcagcatggaaaacagggcgcctaaggctgggagctggaagaaggggcattgggtacccaggcagagtcaggagaggtggtctttgaagtaagttagcagaaatcaaggggacccccgcctccttgggctggggaggggatttcaagatagttcatgactctctcccgctctgccttccctccttcctatctgctttttccagtaaactgcatggtgtccttccctggccttctcttggctcaaaggctgggagggagggaaggagagaagagttccaggcaatcccatcaatatagtccctacacctggggctgcggcccacatgtcttcacggaggcttccagcggtgcctgccactgaggcaggtgcggccccaggaccatcaccaggaatgcgaggccaccctggaccagaggtaggagcccaaggtccggcccttgctctttgattgtgggcagcctcctgccctctctgggtctcagttgccccatctgcagagcgaggaggcccgggctggttggtcttgaaggcccttttccatgccgacatcatgtcactctaggcctggggttcagtttcctgtggctggtgatgctgtggttaagtttgcttgaccccagcagcccgagggactgtctgagtcacagcacagcccctattgcgtggctgctggtgtgtggggtcagttccagcagatgaatgtgtcatgtggcacaccttgtcccttcccgcagcatttcctggttccccccagacccttgagcgctctttgggacccagaaggagtccttgcacagggaaggcttgaggtgagaagccgcttcccagactgtcagggccaggcctgggtctagaattcttgctgctgctttgcagagtcaacagcccatcagcccatgttttagaggggacactttggtcctcggttcccaccctcagcaagcaggcctccagcccgaggaaggcctctgccgtagtgacgttgccgtgtggggctgcgtggctgttccccttggctggagcattcagccaaccccagcgtcccccctgaggcgttcattggcagccccctaggactgcacgctggccccacggtaaccccccctcccccaccaacatcctgcagggatggggtcagtggttccaccttcacaggccactttgaagggtggattctttgaggcccctgccagtcggctccctgctcagctgctggcccgggcgacctgggactcagcaccaacggctgaagtttctcagctgggctctgacctggggtctggggcagggaacgaacatggtggctttgggctgagaggatgagggaggtctttcccaggtcaaattactttcctttggcctctgcctgaggctcgatttgcctctctggtccaatgggactgacactgttgtacaacctgacctgtggctgagggtgtctgggcttaagcatgtggaccccttcggtgtgtccggccttcctccatcgtcctgccctttggccttttggtttgaagccacaggtgtggcttctggccttagcagatggtatgcttgcggaccgcagcccagcatgccggtgggcccacagcccgagccagcccagagctgccggaagggccgcccttcccggccctggcggggtgctggacactggccattttcactagagtttgcctggcagggaccgatctctgccccctcctctccccaggcctctggctgcagtgatgccgcagaatcctgagccaggtgcctcctgagcagcccgtgcgcctctccacagcggcgtttgccacccaatgcggctcgcttcagatgctctgatgcagagggcacgcccatagtccctctgcagagcctcgcactggggccagggcaggcaccagccccaggcggccagtcggccacggcctgtcctcttcctcgtagcgtctgctcctcactttgtgttgatggtgacttaggagaatgttccgattttccatgatctaagcaggccacgtttaaaataacatcaaggcaagcgtacgtgtcaccctctgtactgacatctcttcccctgaaatgcttttcagtttgacagcccgtttcctagacaagtgcacctggggtttcaggaactttgtgttttttcggagggggttggtggggaggtcgggatgcctgggatcccttcctggagaggcaggctgtctctggaaaaagcctccattgcccacccgccaggcggaaagtcaccctgttcccagcgcggtttcagcatttaattttaagggagctaaggaagcgcggcgcgccccctggtggtggtaagccgccaacgcacctgggggctgcaaccccaccggacgggtggtccggagggaggctggagcggggaggcgaggagggggctgtgagtcctcagaggccctgggccaccacatttctggcagcgtttcccagacacccctctgctaggccatccctggatagcaagtgaattaacttaagggcactgtgatgggaagccttgcccccctcttttttttttttttttaatatctgcggaataaacccaatggttaatttttgaatgaataaaaggcttttgttgaat

SEQ ID NO: 16322 - DNA, 252 bp, Homo sapiens
acccgtgtacaatgaggagctggggcctcctcaatttgcagatcccccaagtacaggcgctaattgttgtgataatttgtaattgtgacttgttctccccggctggcagcgtagtggggctgccaggccccagctttgttccctggtccccctgaagcctgcaaacgttgtcatcgaagggaagggtggggggcagctgcggtggggagctataaaaatgacaattaaaagagacactagtcttttatttct

SEQ ID NO: 16323 - DNA, 1328 bp, Homo sapiens
gcgcgcccgcgcccccgccgggccccgcgcgctcctgggtccccggcaccccggccccgcagcgcgactcgccctccagccccaacccccggcccggcgccgccgcggagccccgcgcgctggggttgcgccccggaggcggatctcaggcacccccgccttggcccgtgtcgcagatgaggacactgagggcggcgtccctcacccaggccacgcagctggtgcggctgttcggccgcctcctctgggagggggtccccctgcctggcctcgcccccgagtctccctgctgctgtagagccgggcgcccaggccggcatccccctcgtgggtggcaggagagcggacttagagcccccgagggcccctcagcagaggaaggggagtcccctcctccgccaccgagagtcctgtgcttcggaatgaagggagggcgacctccttgtccgggtgtggtcgggcgcgggggttgtgggggcgccatctcctcttccggcccctgggactggtgtcctgaagtgtcgggagtccttacgcaaccttgacatgtgcgggctactggggtccatcggcagcgggaagagacccggagagatgcatcttctgggcccttctctcctttaggccagcttacccccaaacctggctcctggggacggatgaggaaggagctctttgcagtgcaccaggcacgttgagagtggaggcacaatggaaatcctctgtgggaccccgagcaagaccctgcacctctttgggcctcagtttccccatctgtaaaatgaaggagttggaccaatgccccctccccttcagctgtgacatcgtgcctgggaaggcgaaatatacccccagccccttccaacacacacactccagcgagaggagggcaagactggaaccgctgcccgagaggttaaggtggcttctgtggccacgaagcgcttccgagctgtgcccagtcccgggaattccgcccagtctgcccacacttccctcggtccctgcccgtttcctcaaattcgggccgtgcgcgccctctggtgtcgcctctcacactttgcagtcatttaccaggattcccgtagggcgttttgtaaaataaactataatattaatgaaaagtataaaatgtatagagttttcaagaaactgcgttctacttccagaagatggtcactttaaccttgtaaatatttatctaaaatgatatttacaaaactgtaatatattattatttgattgtatatgtacaactgtaaatacatttgtacctctcttgtattctaaaataaaaattacttggaacatttatcatttagcatctg

SEQ ID NO: 16324 - DNA, 1093 bp, Homo sapiens
ggaggtgctccagaagcacgggactgtggaccttgcaggagtgaagactgtgatgtgtggtccccatatgtggctcagcaaagactcgagagatcatccctttgtctgcattgacggccctgtgacggcctccagcccacaggcctgctttctcctgtcctaacaccaagcctgggtggcagatgaacagtgcttccttgggttgccagctgagtcccggtattagggaatagtttcagctctttcaaagtgcacagtgttacagtcgaatgggctcccatcctggaataatatggagaatcctttgtcttccactcactgtcattcacaaggcacagtgccccatgaaattgccccaatagaaaacatggcatccctgacctccaaatggtctgttttggcctccattcctatatcctttaaatgactgagaatgcagctggtaaagttggaagaataaagttaaccaagcaggccaggcacggtggctcacgcctataatcccagcacttagggaggccaaggcgggcagatcacctgaggtcaatagttcgagaccagcctggccaacaaggtgaaaccccatctctactaaaaatacaaaaaattagccaggtgtggtggtgtgcacctgtagtcccagctatttgggaggctgaggtgggagaatcacttgaacctgggaggcggaggttgcagtgagctgaaatcgcgtaccacactccagcctgggtgacagagcgagactgtgtttcaaagaaaaaaaaaaacaagcagccttttgcttggttggaatctgattttctgttgcgtgttccttgtagccatagatgtgattatgtccacaccgggctgccttaatctgtcctgcttggagagtgacttgtaagatgctgaattattcatgataatacagtgaatgttctgggtccatgtactcagataaacatgaagaaaataagcaaagaaaaatggagactgggaaagcaaagctgttttcatcctataattgaagtagtgtggagcattaacttgtggatgattcagagttaaaagataaaaagacgccagagttctcgctgaagaatgtgag

SEQ ID NO: 16325 - DNA, 1990 bp, Homo sapiens
cagcagtcaggggtcaggtgtcaggcccgtcggagctgcctgcagcacatgcgggctcgcccatacccgtgacagtggctgacaagggactagtgagtcagcaccttggcccaggagctctgcgccaggcagagctgagggccctgtggagtccagctctactacctacgtttgcaccgcctgccctcccgcaccttcctcctccccgctccgtctctgtcctcgaattttatctgtggagttcctgctccgtggactgcagtcggcatgccaggacccgccagccccgctcccacctagtgccccagactgagctctccaggccaggtgggaacggctgatgtggactgtctttttcatttttttctctctggagcccctcctcccccggctgggcctccttcttccacttctccaagaatggaagcctgaactgaggccttgtgtgtcaggccctctgcctgcactccctggccttgcccgtcgtgtgctgaagacatgtttcaagaaccgcatttcgggaagggcatgcacgggcatgcacacggctggtcactctgccctctgctgctgcccggggtggggtgcactcgccatttcctcacgtgcaggacagctcttgatttgggtggaaaacagggtgctaaagccaaccagcctttgggtcctgggcaggtgggagctgaaaaggatcgaggcatggggcatgtcctttccatctgtccacatccccagagcccagctcttgctctcttgtgacgtgcactgtgaatcctggcaagaaagcttgagtctcaagggtggcaggtcactgtcactgccgacatccctcccccagcagaatggaggcaggggacaagggaggcagtggctagtggggtgaacagctggtgccaaatagccccagactgggcccaggcaggtctgcaagggcccagagtgaaccgtcctttcacacatctgggtgccctgaaagggcccttcccctcccccactcctctaagacaaagtagattcttacaaggccctttcctttggaacaagacagccttcacttttctgagttcttgaagcatttcaaagccctgcctctgtgtagccgccctgagagagaatagagctgccactgggcacctgcgcacaggtgggaggaaagggcctggccagtcctggtcctggctgcactcttgaactgggcgaatgtcttatttaattaccgtgagtgacatagcctcatgttctgtgggggtcatcagggagggttaggaaaaccacaaacggagcccctgaaagcctcacgtatttcacagagcacgcctgccatcttctccccgaggctgccccaggccggagcccagatacgggggctgtgactctgggcagggacccggggtctcctggaccttgacagagcagctaactccgagagcagtgggcaggtggccgcccctgaggcttcacgccgggagaagccaccttcccaccccttcataccgcctcgtgccagcagcctcgcacaggccctagctttacgctcatcacctaaacttgtactttatttttctgatagaaatggtttcctctggatcgttttatgcggttcttacagcacatcacctctttgcccccgacggctgtgacgcagccggagggaggcactagtcaccgacagcggccttgaagacagagcaaagcgcccacccaggtcccccgactgcctgtctccatgaggtactggtcccttccttttgttaacgtgatgtgccactatattttacacgtatctcttggtatgcatcttttatagacgctcttttctaagtggcgtgtgcatagcgtcctgccctgccccctcgggggcctgtggtggctccccctctgcttctcggggtccagtgcattttgtttctgtatatgattctctgtggttttttttgaatccaaatctgtcctctgtagtattttttaaataaatcagtgtttacattag

SEQ ID NO: 16326 - DNA, 1272 bp, Homo sapiens
gggctgcccagatccccggcacacactcccccacctgctgtttacatgacccagggggtgcacactaccccacaggtgtgcccatacagacattccccggagccggctgctgtgaactcgcccccgtgtggatagtcactccctgccgattctgtctgtggcttcttccctgccagcaggactgagtgtgcgtacccagttcacctggacatgagtgcacactctcacccctgcacatgcataaacgggcacaccccagtgtcaataacatacacacgtgagggtgcatgtctgtgtgtatgacccacacgtgttcaagtctaatccatccagtcagcagcttacggtccacacacattacagtccacagctgttgtgagagccacctgtgtgctggacaccctctggatgttgggcaagttgttacatgagatgccctggggtgctacatccactcactccagatagcagggaggtctcagcagatctgcagagatcaagggggtcagcaacagccaaagcccctagtcccagagctggctgccctctgtttcacagcagctccctgacctgtgttgctgcgtgcactccctacagctcgacacagccaggggaccaacaggccaagaaatgcaagatcccgggagggttcttagcagcagaatctgaggcccagagaccctgaggccgtggccaggcctgctagtctggctagagcaaggcccattcctggcgggggtgtcattgccttcaccggacgcttccctctcagggtcctgggactgcaccagatgccctgagggaatggcccaccctggcctgtacccacttcagcctgtgatctatccaaagagccaggcccaaaagcgcctaggtcagggtgctcaggctaccaggagcacgcctctgtgcccccggcaacccagttgacctttaattgacgctttccagaccagccctgcggcaccacttgccatgcgggaggccaccagggtgtgcaagcctggctgccattccagtctgtcctgtctgggaatcgccctgtggccaggcccgcatgctggcctctgcccaggactcctcagcatttcctcttggcatccctcccctctcccagaccctcttccagcagatggcaaggcctcggcattgggaagtcaggcacctctgcgggcccagccccctcccgtggctcccctgacaggggcaggggtagggcagcagcacagaccaattccgttgaacgtggaaataaaggaccctttcactggg

SEQ ID NO: 16327 - DNA, 2831 bp, Homo sapiens
ggaccccgcctggactccccagccttcccaccccatacctccctcccgatcttgctgcccttcttgacacactgtgatctctctctctctcatttgtttggtcattgagggtttgtttgtgttttcatcaatgtctttgtaaagcacaaattatctgccttaaaggggctctgggtcggggaatcctgagccttgggtcccctccctctcttcttccctccttccccgctccctgtgcagaagggctgacatcaaaccaaaaactagagggggcagggccagggcagggaggcttccagcctgtgttcccctcacttggaggaaccagcactctccatcctttcagaaagtctccaagccaagttcaggctcactgacctggctctgacgaggaccccaggccactctgagaagaccttggagtagggacaaggctgcagggcctctttcgggtttccttggacagtgccatggctccagtgctctggtgtcacccaggacacagccactcggggccccgctgccccagctgatccccactcattccacacctcttctcatcctcagtgatgtgaaggtgggaaggaaaggagcttggcattgggagcccttcaagaaggtaccagaaggaaccctccagtcctgctctctggccacacctgtgcaggcagctgagaggcagcgtgcagccctactgtcccttactggggcagcagagggcttcggaggcagaagtgaggcctggggttttgggggaaaggtcagctcagtgctgttccaccttttagggaggttactgaggggaccaggatgggagaatgaggagtaaaatgctcacggcaaagtcagcagcactggtaagccaagactgagaaatacaaggttgcttgtctgaccccaatctgcttgaaacctgactctgcttctctcatttgtcttcctaccctactcacataattcactcattgactcactcattcaccagatatttattgacctgctattataagctttacatcctcccatgttgtcctggcatgtgcagtatacacggtctaactcatctctccccagatctctcagaaccttgagcttgggaattgaactggggtcacctgtgtcctttcttatggactcgcaggattttagaaccctaatgcaccctggagggtagctgggccagacttctcatttcacaggtgaggagactggtgccccacagggattaagtgccttgcccaaggtcaggcttatctccagagggaggtgccctggactggggcccagatgttcagggaccctgcctacacctcatttccagtgtgggctgccttagttagttatgagaacagggaagggctgggaagagacagcctccaaggtcaacacttggagagggtttcacttgctctgaagaccctggtccaggattcgccctctcccatgccttcaagtcagcatcaggcttagggcaaagaccaggcctctgaagctgcctcttgtaattcatgcaggaagatgtcaaagtcagccccatcttggctgatcagggtgttcagccttaaccccacctgtgttctgaagtctcttaccctacctgctcaggactgagacagttattcactgaacatatttattaagcacttgctgtaggccaacagttaagaatccaataatgaaatggacagattcatggaacttagagtccaataggaaagtgagacccagacaatgacaatgagataaatgttaggaagggggaggtatggggtgacttccctgcagtcctgggggcctagatgggcccaagactgggtgagagtcttggcagagcctttgcaacaccttaagtggacaggactgggaggtcttggtggttggagccaacgtgggttccctgcggctccttagtcacctctgatagcagattgagggaggaaaacaggtaaggcatgaggaaatggccaggttgggttaacccactggtttcaaccagttcaggaatgaggttatttggccatgactggctgatcttgagctcaaggatctgcttcaaatgcacacaggcctagttgaagtttaaaccccagcaaaacattcctccctgtaaatggaaaatcctacttctacccccaccctgccctgttttttgttttttttttccccaagatcattagatgtcctcacccctcctcactgcctctcctctctgggacaggctgggacctttgaggaagataaagccttccttcactacccatcatattcagtgtccctgttcctcactcagagaggaaggcagaaccagtcaggcttatttcagtaagttccacagttctacaagactgcaggaattctccttaagggaggagagcaagcaggtgtggccccagcttctggaaatggcagaagagagggttttctcattgaatgggggtgggggctcgtgtgtcctgggaaaccccatcagtcccttcatttcttgagactcaactcctgggaggagagggtctcaagagttgtccctggaaggagggcgggggcagtctgcatctatttcaggttgtggctcttggttctaggactcttacttctctggctaagggctcagcttcttgggacttcaaccatcttctttctgaaagaccaaatctaatgtaaccagtaacgtgaggactgccaagtatggctttgtccctatgactcagaggagggtttgtcgggcaaattcaggtggatgaagtatgtgtgtgcgtgtgcatgggagtgtgcgtggactgggatatcatctctacagcctgcaaataaaccagacaaacttaccaacgtct

SEQ ID NO: 16328 - DNA, 216 bp, Homo sapiens
gggcgtgtcagcaggcctttcgatccctgggaccaaccgcatcctcagcttcttccccgagaaatgctggagcaggctgttcagaccgacgttgccatcaaaacacatacacccagaaagaaacaacagaaaccaaaactcacaaggcgcatgattacttgttttatatttcatgttgggttttccctcccactattaaacagtctgtttccgtac

SEQ ID NO: 16329 - DNA, 973 bp, Homo sapiens
agcgcccgccggcccacacaagcctctgggggcagggctggccctagagaaggggcagggggtggcgaggtggcgggcgtgggtggaacagagcggccaggagtcagagcggccacccccacctcatcttcccctcctggctggaggctggcgaacccaggccacccctcccggagacaagcgtgtttggcagtgccaggcctcttgcccctttgcttggactccaagtctcctctctaggcagccaggacccacccatggggacagccctatttagcttctgctctgggaacagcaaaaatcaggatggtgggaggggccgagtcttgtcttgtcctttcatcatcatgactgttgagttcttggctgtgcccatcacgccacagcacgacgcctgccaaaatgcccccaacctactgcctgatgcaggtgccattgccattagcggtcatcgacagcttagggcagcactttccaacgggtgcccatgggacaccagcctgcgagatgcttttgggggaaaggggttttgtggttcaataactttcggaagtgctgcacactctgtccccaagttggacattcacaaaggccgttattgccgtaaaggctctgacaagccctatagaaaagcttcttgctaaaccttctttaacccatgttttctaaacttatttgaccacagaacccttttcttggggaacagctattaacccccaaggaattattggttcctcaagtgcgttttgggagctgctgccagagagctaaagggcctggggtgtgagctgactctcctctggggaggccgggtgcacacgccacagcccgaggaaagtgctggccaccgcccgtgggcatcgatgaggctttggcccccaggggccggactccgtgtgacctaataggtcgtttccaagtcacccgttttggatgtgcatttcatgtgacaatacagatgacatgcaaatgg

SEQ ID NO: 16330 - DNA, 699 bp, Homo sapiens
aacaagagtgtggcaaagaacacccgtgctggggtcgggatgaggttgaagggtcttggtcaatgtacgtaatgagcagggtgggccccacgctgggaggacacgggctgggctgagcagggcctctagtggaacacatgggggtctcattgaaaagctctctgatgagcacctccttttgtgcaaagttaattttttctcgacaataaagatattccgtgtctttacccctgaactaagacacagggagtatttcagaggccagcgtaggagtcattgacaacaaaaagccgagaacccagggccagcagtggagcctcagcagaccagggcctggtccttgctaactgctgcagggtggagtttgatctggcagacccgatcctccttcatgaacacccagcaacctgagcaagtcccggccctgccctcagcgagcccggcaggcgtcctgggacagctcagtgttggagggccacctgaaccacgagccagggctggggcttgcatgtcattgtctatgacagcgtcaagactggcccttggcaccgtgctgtgtggaaaccctcccctctgagactccactgagacgtggctgagtgaaatcttcctcgtcagtggtcaaggtgtgtcatccatacagctccatgcctttgtcttttttaaatgtaattaaaaaaggaaccaactggcgtttgt

SEQ ID NO: 16331 - DNA, 721 bp, Homo sapiens
gccccgcccggaggacgctccccgcacccggaggccgggggtcccggggtcccggggcggggccggcgtccgaggccgggcggtgagaagggtgcggcccgaggtgctcccaggtgctactcagcagggccccccgcccggcccgcgctcccgcccgcactgccctccccccgcagcaggggcgccttgggactccggtccccgcgcctgcgatttggtttcgtttttcttttgtattatccgccgcccagttccttttttgtctttctctctctctctttttttttttttttttctggcggtgagccagagggtcgggagaaacgctgctcgccccacaccccgtcctgcctcccaccacacttacacacacgggactgtggccgacaccccctggcctgtgccaggctcacgggcggcggcggaccccgacctccagttgcctacaattccagtcgctgacttggtcctgttttctattctttatttttcctgcaacccaccagaccccaggcctcaccggaggcccggtgaccacggaactcaccgtctgggggaggaggagagaaggaaggggtggggggcctggaaacttcgttctgtagagaactatttttgtttgtattcactgtcccctgcaagggggacggggcgggagcactggtcaccgcgggggccgatggtggagaatccgaggagtaaagagtttgctcactgctgc

SEQ ID NO: 16332 - DNA, 777 bp, Homo sapiens
cccctccctcccctgccacaagaagccatcttgacatagtggaaaattcccagaaggactccctatcttgccccaaccctgacattcccccatttttatgcaggttctgcttcaaggagctcagattcaagtcttaggctaattgtttttggtaaaagtccccccttttaggttagccaacattagtctccacttagccccagtgaccctctacctggagcctcctcctctcctcctccttctcctcctagggcaggctcaccctgcctcttctcaagccctcacctgccaagacaagcccaaattacaagacaattttttagactccaggctaagggtcgattccatggctctgcccattaagtgttaagaacgacctgtgtatttgctgcagaaagcatgacagtgacgtgctttgaaagccctcattttctattccaaacatgagttttaattgctctttttgggatgcctgatgtctcatcacggcagtattatctctctgggacctctgacagcaggaagagccaatggttcattactcgagcctgcccccgcctcctcagtgctggggccccgtcaatcaagcaggccaagttggactcctcccccaggactgactttggaaggtcaacccactctggaaaaagccttccaggccagcgggtagactgctgaacacaggctgctgagcttctcagccgaattcctggacacttcctcactcggtctttccgtgtgttctttggattctctctgaaaattttatgctgatct

SEQ ID NO: 16333 - DNA, 731 bp, Homo sapiens
ggcgcccgtcggctccggggcctcctcccgcgggctcggcgtggccccttccgcccgcctttctgagggcgcaggttcgacgccctttcccgggagggggccctgcccggccctccctggcgccccagcccagtgccccccgaagggccaaatgccaagtccactgaggcccggaccccggactgcgtctccccagcccccctcggcgtcctctctcgcggccgctctgtccgggagccatccccacccgccgggtgtacatacgcgtctctgccactccccacccccagcctctgccggctcccctaggcaacccctttctccccaggagcgggtgcggctgattcccaggcttcgctctctcccacgccccttctacgctccaggtggagaacagcccctctccccgcgcccccgccagggagagaaggggagtgcggagccccgtctccctacccctcgagcacctgggccagcggctgagctgtacataccgtgtgcaaagtgtatatgaagttatttattcgtgacccatgagcccgtgaccgtgtccgtggattagtgagtctgtggcctgtgccctccccactcccaggcggggcaggaaggggccaagggggcttgcccacccaccccgaccccagcccccagcctcagccccggtccgggggcagccaggcctctcgggttctctcttttttaaatgtcgaaataaacttcttacaaatgac

SEQ ID NO: 16334 - DNA, 1138 bp, Homo sapiens
ataatcagtgacgggaagatggaagggcatgatgaactctgccatagaaaacttcctccagcctgaagagaaggatgcactggaggaagccggaccctcacgagtggagagaagtccttggtgattgtaaagagggcccctggagctcatttctgaatcgcactctccatttccagagactaaaggatgtcctttgaaatggctggactcagagagttggagtcgttttgagatgagcattagccccagctttgtaaccaatgaggaacacttacttatttttaagtatcttgacagaagcaatttgaacacagtgtcccgtcatttctagaaacagaatggtctcttctagagagcttggataaggaccttgctgggttgagttaggttttaatccttgctttggtttggaactgccttcgggctccagaacttaaattgcttggtccgtggcatctgatgtaccaacagagattaaaagtgtaaagcaacacatgggctgatgttttgttctcagaaaatagctgctggtctgcatccctccattcttgttttttatgcatatggaaaacattttcctaaaactctatattcttaagttgaagccaagactaaaatttaatgtgtcaaatgatctggtgactattataatgaataattgtgacttatttttcattctctcctgggtcatcaggtttcctgacccaactccttaatccgtataaagatgtcaaatactgtagttcacccacgccacagccctgcttcagacttaactgtggtagcctagatgagctatttgtacacagaggaaaaaaagatattttcctcttttagtaataagactttcagtatttttaatgttgacatttccagatgtttcatttagtatccaggggtctgtctggagacttctagagagggacagctcagaagtgagacccttgagctctggtgctgtaagcttgtgcaattaagttgaacagagcctgggaatttctttcctctgcacagtcccttgatatttggaatccaggttctgcccccaacccctacccacccagtggtctgttaagatgtctcagatggggctgggcttggtggctcatgcctgtactctcaacactttgggaagcaa

SEQ ID NO: 16335 - DNA, 63 bp, Homo sapiens
cttctgtattattgttgcttcctcagggggagacagtcaagaataaaaagtattctaccacct

SEQ ID NO: 16336 - DNA, 645 bp, Homo sapiens
ggctgcgccggctcccagctcctggccagcctgccctgcggtcctgtcacctggaggccagcctcacatgcccaaatctccagtctcctggaggtgggactggacaggagtctaccagcttgttttgagactcatgaaattgctgtgtgaccttgggcaagtcacttaccctgtctggatcaacatttctcctgctgccaagtgtgggagcctggctgggtctttctcagcagaagttgtttccaggtgtgctcaagtgccttcctctagcagagcacagaaagctagaatacccccagggagacagggatgccaagagtagaccagagctgggacccacagacagaacctccacctgcctgctgcccactgagctgggacctggtcaccttggattttagccggcctctttctggctataacaggcagagtcggagctgcctcccaccccagtcagaagcctggcaccccctctgcttcggccagatgtgctggctgactccgacttccgaccagcactcagctggcctctggggattctagctccacaaccaggccgtgaggctggagaaactggcagttattgctgtcaaaagcctgttctctcaactgctgtcaataaaattaaagatacagatttgctgc

SEQ ID NO: 16337 - DNA, 17 bp, Homo sapiens
taaaagcacatgccgtg

SEQ ID NO: 16338 - DNA, 674 bp, Homo sapiens
atgtttgtatggaactgaccttgatctccacgtgtatagttttcaagactgctctcctgcctgcctattatcccatctctatgactgggccaaaatcaatcttaaacgggaggggtaatcagacctctccaaagagtttcctgtccatgactgctggattgagtcacatgagtaactgctcctggacccggggactgtccacgaaaactgacttgcctgcttcctccttccaggaactggtttcttgcgcggaaaaagtgctcttgaggctggaggcagccacctctcccagcccactgggtggggaagcagctcagccctgatgcgggggagaagacagataccccacaggcccctccctccacgtgtgccctctccctgtccttcctttccatgggccactgtttcccttggggtggggggaagggtcatccagcaccagaatgcgcacctcacactcctcttaggtgactaataaagaggcccaaggccagtttctgccttaatcatttctggcaagaggctgtgactggccagtgggatacttaattctgcagtctctatagacctcgcccctggacagagcagtccttccagaccattctagatgagagtcaacactgagcctccacaggctccattccaagtaaacatctgcatttattttaaatcgc

SEQ ID NO: 16339 - DNA, 520 bp, Homo sapiens
cagggcccaaggctgggcctccctgacccggccagactggtgtctggcctaatgagggagccggggctccccattgccacccacagtgcccggaatggccctaggaggccctctgaggagagctagagtcccagcaaagggtgcagctgaccctagcactggctgtgacatgctgcttggtgctgcctctggtcctgaggggttagggacatccccaaagggtataccctggctctgccacccatgaaccagcccagcatccagccagtgagtgggcacccaatgcctctcaggatgagaccagtaaatgccggaggtggagctgggcagctgtggagccccaggccacaggccagtctcgcttggctctcatgactgtggtggtggagatagcgtggggagcctcgcccatggtctcacgtggcaagaagtgcctttagctctggatcccaaccgtttggcacagctttggccacagccaggcccctctggaattgtccttattaaaccagtttcccga

SEQ ID NO: 16340 - DNA, 97 bp, Homo sapiens
cgtcccatgagccttggtatcaagaggccacaagagtgggaccccaggggctcccctcccatcttgagctcttcctgaataaagcctcatacccctg

SEQ ID NO: 16341 - DNA, 59 bp, Homo sapiens
atgtacactgttgagttttctgtacataaaaataattgaaataatacaaattttccttc

SEQ ID NO: 16342 - DNA, 205 bp, Homo sapiens
gggtcattgaacatttgttccgtgtctggccagccctggagggttgacccctggtctcagtgctttccaattcgaactttttccaatcttaggtatctactttagagtcttctccaatgtccaaaaggctagggggttggaggtggggactctggaaaagcagcccccatttcctcgggtaccaataaataaaacatgcaggctg

SEQ ID NO: 16343 - DNA, 2111 bp, Homo sapiens
agggctgggcgcccctccctccctgtcccctcttctggctctgtgtgggtccaagtgaggcctggactgtccacgctgaggcacagcctggagaggggcctttgcacgtgtccctacacctggagtcctctgctcctttctccagactggcttaagccaggagccactggctgctggtgtgagggtctgggctgctggacttgaggcagagcctgcagcagctgtgtggacactacccagccctactcctctgctgggtgggtctgcagatctcacaccacagacagggctgcctgtgacctgctgtgacctgggagcagcttcccctggagatgctggtcctggcttgaggggaggggcaagtgggaccctgccacctgggcactgagcagagggacctcccccagctctcttagcaggtggagccccagggcctgggacagcctgccgctgccagcaacctcccactgctgcctagggtgcagcgcccactgtcaccctgccttctgaagaagcccacagggctcctaaggtgcaccccggtacctggaactgcagccttggcagtgactggacagctgggtgggggatgctccctgctggccctgggaaccttggacaggccacctcaaggcccctcggctgcccctcctccctgggcctgctggggcccctaggttctgcccatcaccccccgcccctgctggccttggtgctaaggaagtggggagagcaggctctccctggcaccgagggtgcccaccctctccctggtgtggccccgtcaacatcagccacagcccagccccattagtgggttagtgggtctgacctcagccccactcaggtgctcctgctggcctgcccaagccctgccctcagggagcttctgccttttaagaactgggcagaggccacagtcacctccccacacagagctgtccccactgccctgggtgccaggctgtccggagccaggcctacccagggaggatgcagagagctggtgcccaggatgtgcacccccatattccctctgccctgtggcctcagcccgctggcctctctgaccgtgaggctggctctcagccatcgggcaggtgcctggtcgggcctggcttagcccaggtggggtttggcagaagcgggcgggtgtggaagatattccatctggggccaaccccaggctgggcctgcgctgagcttctggagcgcaggtactgggtcttgctaagtgaactgtttcccaggaacacctctcgggcccatctgcgtctgaggctgggagtggcatctgaggccgggagtggcatctgaggccaggagtggcaggctggtgggctgggcgtggggttttctgggccctgcccagtactgccctggggacttggtgggctcctgggtcagcagcatcccacccctgggagtctggccagctgagccccagggtggcaggggcattatagcctggtggacatgtgccttcagggttcctccggggccaccttcctcaggccagtgctgggttcaaagggctgtgtgtgtgtgtgtgtgtgtgtgtgtgtgtgtgtgtatgtatatgtgtgtgggtgcacacatctgtcccatgtatgcagtgagacctgtctacctcccacaaggagcaagggctctgcccgccctctgctcattcctacccaggtagtgggaccccgggcccccttctgcctggcttgcctgcttctgccctttccagaggggtctcactgacagccagagacagcaggagaagggttggctgtggatcaaggaaggctgcccctgtaccctgtggggaaatggtgggtgcatggctggatgcagaggtggaaggccctgggccacaggcgagagtgggcgtgtcacctgtcccaggttcccagcaagtctgcagctgtgcagtcctggggtccctgaccctgtcgcccagggggcgtgctgtccagcaggggccctgccttgcaaggaacgtctcttccggcggctgggccgctcctgcctggtctgggctgtgtgtggcgccctttcctccttgtttgttcctctgtgttctgtgtgcgtcttaagcaataaagcgtggccgtggctcgcgt

SEQ ID NO: 16344 - DNA, 654 bp, Homo sapiens
gcccggcagctgcagccccttccagatgaagaccaagcgcccctcctggggctgctgcagcttctggggcctccacagacccccctcctgcggggcacgctggcctaagagacgtggcactgagcctcggctgtcgagaggggacttcccacggcccgtggacctttgtgctcctggggcagagcctccggcacccagtggcctcccccagacagagccacccctgccgtgggaacctgtccgtgttcctgcgtggatcctgtgtttgtggctcccactccccagccccccagcagcccccagccgaggggcccagggcccacagccagcggtggaggtgtcttgctccgggcccgtagcccacgccctctctgggtggcagggccttctgaaggaaacttgcaggcgagcccaacgtggtggggggccttcctccctcagaggccatggggtgagaggggctcaggcagccaaggaggcccaggcgtgctccctcttatggagcccctcccatggagctctcttcccgccgcactttctaccccgggcagaggcgcttgcccacgggacgtttggggatggacctcggcccccgcccctgcagtcagcgtcagtgctcatctacgttaataaagtggtcctatttatggcggc

SEQ ID NO: 16345 - DNA, 897 bp, Homo sapiens
ggggggacctactcctccccctcctccatgctgtccctgtgggctcacaccggcactgtgcactctactctgcgacgatccccatggaacagccctgcacgcccaggatgaaggggccagaccacgcccctgcctgagaccacggtccaatccagccttcttcccccagggtcccctgcatggctgagagggtgtgggtgccctgttgacctaccctggaccgagtggaccacgacctcgtccatttaaacccggctgactcagtgcagggacagcctgcacagtggtccagggtccagccctccgccagccctgttccgcctcactgggtgtggcctggcttctgggacaggcaccatgctgggccggggtgtggaatcaccgggaacgcccccgcccccgccccgctgctcccggtgtgcagcgggtgcgggtgccgcttaaacatttccctgctgagtggctcgtgtttcacagtgggcggcttccctgcgacggaggcaggaccaggcatttagctagttagagactcgcctgggaaattgctccattcctgagtaaacagatattttcgcccacctaaagggaagccctgacaacaactatcaccaaaagacgaggcggcaaagatccagcggggcttctgggcgccggttccacgtggggtggaattattagcaccagcttgcttctctgccggtggggccagcgctgaacagaccggggtggagtcagggctgtgctttccgcgtggttctgccacttagggagtgtgccttgggcgggccatttcacattcctgaccctcacttttctcatctgtaaaaccaggctgatgccgtgcgggctaatgagccaataaagctcacacttgggctggcacccactggaggtggg

SEQ ID NO: 16346 - DNA, 1978 bp, Homo sapiens
gtccctttgctcctgcccgcgagagactgtcgggaagttgacccggattggcaagaaacagggtgtcttggaggtggtcccccagatctgcgcctgggggtcaggacagggcctgatttgagcctcctctctgaagatgatttggccgagcggaaggtgtggaccaccggaaagttcttaaaagttgctggtgacatttcttgccaattctaacactgtctagggaagagttcctagtctattgtgttcaaacagagtcaacaaaagtttttaattttttattacagaagggtgaagttcaatttaacatgcgttgtgttttttcagtaaacgttctgtatctttttgatattccatgacccagtgcacgctgtggcctgtcaccgccaccgtggccccgccagctggcctcccctttggcccacgccggccgcccccattctctgctgcgtagatgccctggcccagggccctgactcctccattcccgccagtagctgttcctagtgtattttcgtctttctggaaaacagcattgagtggttgttttctgtgtaaagagccgtttgtgtcttgggagtttgtggcccacatgccgatagcacggtcatcgcacatgactctcccgtttgtctcagtgtccctgcaacaagcagcaccgcagactgtaataaaaggtggggttttgtgaatggttgtggcaagtgcgtccttgtgaagctcgtctccatgtggctttcttggagaaaggctcccctggggcaagagggtggaaggtttctttggacaggaggtgctgaggctggctgcacctgctctctgaagacgccttcctctctaggttcattgttcagtgttgctgggggcggggaacgggggtggggaggttcttagttgcgaaggagccaagctcctgatggacttgcgttgggatgtgggggacacctgtggcatggtaaggctccctgagtcccttactccaggtcagatgccagtgggactcatgcgccctatgagggctgcagggccagtgctgcccctcggactcctcgaggggttgggtgctaagcgcgagcctcgccgtccctgctggagccctcgcctgcctgcccctctgcctgtgctcctggcagtgtggcttcccggtgctcacctgcacagcagttaacagcagaggccgagcgggagcctctggggagcgaggctgaaacctgaacctgcccatggagacagttgtggtgagggttgccacacacagtgagggcggagcagggtggctgagggcacaggtgcctgggtctgtcccacggggcagggctttggggctgtgatgctctgggaagccagcttgggtcctgggtctacagagggccctggccccggagcccagccagctctgcctctctcagggcctggagtcctgggggagctcagccagctctgcctttctcagggcctggagtcctggatgaatcctgcaggtttttggttgcaccggcccagggaggaagcggggggtttgtcaggtgggctctcctggaggtcctcgagtggcaggggtgaggaggggattatctgaggcatctggagatgtatatcctgtggtttcccctgcccctctgtttccgatgaggtgtacggatgagtgacctgcactaagaagtgagttgccacagtgaaaatgggttggtttttgtcttcgacgctcagggtctgggcgcctcgcatttgcagtctgttgtgacagacacggggagctccgcgtgccagcctgtggctgccctgctgtgggggtcctggggccggcgaggccccttcagtcttgttctggggggacggcccactccggggagggggtgtgctgtgctgagcgctgtatccctgaatatagtttattttttctacatttgaattctgttgtagatttatgtaaaaatacattctttttgaaaataaaaattttcatgtcttctaattt

SEQ ID NO: 16347 - DNA, 3971 bp, Homo sapiens
gcctgcgggcccatcctttgtgcccacccgttctggccaccctgcctggacgccagctgttcttctcagcctgagccctgtccctgcccttctctgcctggcctgtttggactttggggcacagcctgtcactgctctgcctaagagatgtgttgtcaccctccttatttctgttactacttgtctgtggcccagggcagtggctttcctgaggcagcagccttcgtggcaagaactagcgtgagcccagccaggcgcctccccaccgggctctcaggacaccctgccacaccccacggggcttgggcgactacagggtcttcgggccccagccctggagctgcaggagttgggaacggggcttttgtttccgttgctgtttatcgatgctggttttcagaattcctgtgtggccctcctgtctggagtgacatcttcatctgctctgaatactggtgcccagccagcccgtgacagcttccccctaatcaggaggggacagctgggggcgcaagctggtgtgtcatcagcaaagacctcagccgcctcggggatgagaggggactcgtggggcaagcaagctgccctgtgctctgagtgagggggaaggtagcccctttttccaaagataactcacagttttgccctcgagccaatgagaacatgagctgccctctgtgcaaggtttcggggccacctccaggctgcaggggcgggtcactcacccccctgttttctctctgccttggtgttctggtttcagactcccgactccccgttcagaccagagtgccccggcccctccccagcctgagtcttctccttgctctgcggggtgggctgaggcttgtccttgtttcctgcagggctggccctggctcgggcagggtggggcatcaccacctcactggccttgctggaggcacagggctctgcggacctgcagccatctgtgaggcccgcggggatgggaggggaggagggtggcctgttggtttccctcagagggggcaggtggcctggagagagaggggctcaggaactgggagcctcgtgggtggggcagatgctccgcggcctggagtggctctgccggggcattggtgggacccctgctcaggccttctctctggctgccagttgtgtctaaaagactcttggaatctgagaacccggagtcgcagcgccctcgggcctgggccacacgcaggccctggtgggaccacccagcctggtattgtccacggacagcgttgttcacccagagccttacttgggagcctcactgaacgcctgctctggttgaaggtggggtgggggcggggcttggggcctccctggctcagcccagtgcggcctggcgctcctcccgcaggctctgcccccgggctccggtggtgcggggccctctcaggttgaactcgcctcttttgcactggaaggccctccctttggcctgagtacttttcccgttcacgcctcagtcccgtggacccagcctttgtcagtggcaggtgcctgaacagagggtggatgggggggataccggagggggtcttgtcttcccagccgcagtctaggaatgatgcgggggggtggacgccttctccatagtctttccccacctggagcaggggcttcctcagtggtgaggggagctgcctacaggttggaccgggaggcagtggcttggagaggcagctttccagccttggtggggaagaaagtgtccattctttgccttcctggagctcccagccagagctgagcttaggcacccgagtggagcctgcagctgagtctgtgcccgagacaggctgtcagagattccagaagcctctcctccccgccgccctccacccctgcctttcagcgttgtggatccctagaggtggccccctgcccgatccaccgtcctgaggcagagtgttgagcctcatacctgtaccaggtccccggccagctgggcccctcccaggcactgccaggaagccccagctgcccctggcgggtgtggtggaaatggcaggagggtgcaggtactcttggggccccagcggtgggagtgcaaaagacccaacgccaacacctggtgccttctgcagccagcgcccacccatccgtgcccggacccttgggaatgcccgcggctccagaggaaaaagcccagggacggggcctccgttgcggggggtcggctgcttcttgggaactttgtcgtttccggcgctggctggctggctggctggctgtaaagcactgaagccccccggccgccaacccctgaaagcagaacctggcctccctggccacagcagccttacccaccgctctacgtgtcccgggcacttcccgcagccttcccgtccctttctcatcggccttgtagttgtacagtgctgttggtttgaaaaggtgatgtgtggggagtgcggctcatcactgagtagagaggtagaatttctatttaaccagacctgtagtagtattaccaatccagttcaattaaggtgattttttgtaattattattattttggtgggacaatctttaattttctaaagatagcactaacatcagctcattagccacctgtgcctgtccccgccttggcccggctggatgaagcggcttccccgcagggcccccacttcccagtggctgcttcctggggacccagggcaccccggcaccttcaggcacgctcctcagctggtcacctcccggctttgccgttcagatggggctcctgaggctcaggagtgaagatgccacagagccgggctcccctaggctgcgtcgggcatgcttggaagctggcctgccaggaccttccaccctggggcctgtgtcagccgccggccctccgcaccctggaagcacacggcctctgggaaggacagccctgaccttcggttttccgagcacggtgtttcccaagaattctgggctggcggcctggtggcagtgctggagatgaccccgagcccctccccgtggggcacccaggagggccctgccggaatgtgcagcctgtgggtagtcggctggtgtccctgtcgtggagctggggtgcgtgatctggtgctcgtccacgcaggtgtgtggtgtaaacatgtatgtgctgtacagagagacgcgtgtggagagagccgcacaccagcgccacccaggaaaggcggagcggttaccagtgttttgtgtttatttttaatcaagacgtttcccctgttttcctataaatttgcttcgtgtaagcaagtacataaggaccctcctttggtgaaatccgggttcgaatgaatatctcaaggcaggagatgcatctattttaagatgctttggagcagacagctttagccgttcccaatccttagcaatgccttagctgggacgcatagctaatactttagagaggatgacagatccataaagagagtaaagataagagaaaatgtctaaagcatctggaaaggtaaaaaaaaaaaatctatttttgtacaaatgtaattttatccctcatgtatacttggatatggcggggggagggctgggactgtttcgtttctgcttctagagattgaggtgaaagcttcgtccgagaaacgccaggacagacgatggcagaggagagggctcctgtgacggcggcgaggcttgggaggaaaccgccgcaatgggggtgtcttccctcggggcaggagggtgggcctgaggctttcaagggttttcttccctttcgagtaatttttaaagccttgctctgttgtgtcctgttgccggctctggccttcctgtgactgactgtgaagtggcttctccgtacgattgtctctgaaacatcgtggcctcaggtgccagggtttgatggacagtagcattagaattgtggaaaaggaacacgcaaagggagaagtgtgagaggagaaacaaaatatgagcgtttaaaatacatcgccattcagttcgtt

SEQ ID NO: 16348 - DNA, 2537 bp, Homo sapiens
gagccgccgagcccgggctcccgagagcaacctcgtgacctcagcatgccattcgttcgtgagtgtcccgtgcacgtcctgaccctggacagtgaaggcttctccctcccctcccacctgacttcatctacgcctcggcaccacggggtgtgggaccccagcccggagagaacagagggaaggagccgcgcccccacctggagctgaatcacatgacctagctgcaccccagcgcctgggcccgccccacgctctgtccacacccacgcgccccgggagcggggccatgcctccagccccccagctcgcccgacccatcctgttcgtgaataggtctcaggggttgggggagggactgccagatttggacactatatttttttctaaattcaacttgaagatgtgtatttcccctgaccttcaaaaaatgttccaaggtaagcctcgtaaaggtcatcccaccatcaccaaagcctccgtttttaacaacctccaacacgatccatttagaggccaaatgtcattctgcaggtgccttcccgatggattaaaggtgcttatgtttttgtgagttttaagtaaatatttgtattgtattgttataaatgttaagtgtgcctggctttcaatcatgcacggaaacccagtctcagtcccacggacagaatgggcgaggcatggattctgggttgcagtaccgttctgattagaaataggaagtctccccacccccgccctggccaagaacgtgcaataaattggaagtttgccccggggcagcaagaatttatgctgccattgaaaagcaggtaccagtgccccttttcagacagtttttgattcgctctagactttttttttttttaatagggaaaaaatttgataattttcttttttctacatgcacttaagactaaaacacaggtttggattaattttatttgcttcctttttccgcttttcttcccgcagagcctgatgggagaatgtccagggcagggaaaccacattttttgtaggtgataactcaatgaaaattggtgcttattttttacacttctctcttgtggctctcttgtggtgctatctatctgttttaaggtctccttgaaggcgcactggggaccctggccatgcctcgttctccctgctttctttatcctgttattgcctccacagtctgttgccaaggactctaagatcaatgcacgtcactttcctttccactgggcaggatagccaagcacactccctcctgcgctctcccgccccggtgcgtccactcccgagggctgttatgaggactgggttgtgcctacttgatttgaaaacacacacaagcaataaaaagcctcttcctgcattgtctgtggtgtgaccatagcagattatatttggttcctgaatgtttgtggtgctaatttctgtgtttgttccaagccgttcagtcatgccatgcgctgcctcggtagatggagtaatgtacaatgaactccatgagtctctccagggctgcctgcagcacgtcttttccaagtagcctatttggattcccatctcaaatgtcctggatgcgagcgtcagcggctccagagctcggggcgggtgaggtcccctttggggaaccctttcctggccatcgaggtcggggggctgccgtctgtgggcaggaggacccgaggggcagccaggaaaggcgatctcttcactgtgaaaagttgcccgggtgcagcgccttttccttctaccatgggaaatgcaggctgggcccttggggtgagcctgcggggctctggtgctgtccccgacccccaccaccaccagaatgcagttccagcttaggaagccacaaacaagccacccaggaggaacaaaacaccgccagcgtggattttccaaatttccctggaaagtaagtctcgctcttgccaaagaaaagtctggcttggagagtctctggagcccaggatgccagcatgtgccaatgactgtcaccttcatctcttcaaaagaaaagccatagccgaggactgtcccgcgacccccgtggactgcgtctaggtcatgtgattctgttttcatttctcatcccatccaatttgtccttttctcctgtcattttcttcctctgtggtcccttcaaagttgttataatttgtactgaacttcaaaatgtgtcccgttctccccagaccactctagccacagtatattgcaataaaattacttcttatatttgcagaaattcttttggtgtaattttattttttcctctcaatatatataattggacaaacgctggcaaaaagaaaaaaatggtaagcaaaaaacccaagataaagtttcgaggacatcaggccttttgaaatacaatgtcaaatgacacattgtacggtttcaaaaaatccgctagacatgtcataagttttaactgtaatgcccaggaaaggatatcttaaaatattctaaacttgtgtaacaaaggaataattaactgtaatagtttttcaataaatcgagttgggtgtttccaccgt

SEQ ID NO: 16349 - DNA, 105 bp, Homo sapiens
cccaggccggcctcagggtcaggacgcctccacacatagttggttggggggtagggttgggagcttggccctacggtttgtaaaagaaacacatgtcgtgattct

SEQ ID NO: 16350 - DNA, 1006 bp, Homo sapiens
ctccctcctcctggaagccaagggcccacgtcctcaccacaaagggactcctgtgaaactgctgccaaaaagataccaataacactaacaataccgatcttgaaaaatcatcagcagtgcggattctgacatcgagggatggcattacctccgtgtttctccctttcgagccggcgggccacagacgtcggaagaaactcccgtatttgcagctggaactgcagcccacggcgccccggttttcctccccgccctgtccctctctggtcaaacaacatactaaagaggcgaggcaatgactgttggccagttctcaccggggaaaaacccactgttaggatggcatgaacatttccttagatcgtggtcagctccgaggaatgtggcgtccaggctctttgagagccatgggctgcacccggccgtaggctagtgtaactcgcatcccattgcagtgccgtttcttgactgtgttgctgtctcttagattaaccgtgctgaggctccacatagctcctggacctgtgtctagtacatactgaagcgatggtcagagtgtgtagagtgaagttgctgtgcccacattgtttgaactcgcgtaccccgtagatacattgtgcaacgttcttctgttattcccttgaggtggtaacttcgtatgttcagtttatgcgatgattgttgtaaatgcaatgccgtagtttggattaataagtggatggtttttgtttctaaaaagaaaaaaaaaatcagtgttcacccttatagagacatagtcaagttcatgttgataataatcaaaggaattactctcttcttgttaaattagctaaatcatgtaaccgcagataggaagggctcgcctggggaaactctggtttccgatgggacaggaaagtcatacgggcaacagtatgcggaaagtacgttttttaagtaaaaaacaaaggcaaactttgtactatccagttatctaaggaacaataaaaacattaggagatctttt

SEQ ID NO: 16351 - DNA, 320 bp, Homo sapiens
cttaaaagagttttttcaatgctgcagtgactgaagaagcagtccactcccatgtaaccatgaaagagagccagagagctttttgcaccatgcatttttactattattttccaatacttagcaccatttcactaaggaaccttgaatacaaccaggatcctcctttgcatgcgactgtagctgcatttcatgaatagtttgaacccttgtcaatgcattttttgaaaaagaaagaaaaaaaaaacttcgtgtatgtgactcaaagcatgtaaccttaagatgttgcattctaaactgacaataaagacctttcccaaata

SEQ ID NO: 16352 - DNA, 753 bp, Homo sapiens
gccctcgagctgtgggttcgcgtcctgggttgcgtgcattcgtggaaagcggcgtagccgtgcgtgtgtgtgatggttccgtggctgcaaggaagggaaacagtctattatacatagccctgtatatatgtacaccaacatgaaacttttatttaacagacgtgtcctggtaaatatgatttttgtagctttttgtaaattatttaaagtgatgtaaaagatatttttggaaaatactgttgttcaattttgtagggtgttcctaactgcagttttctgtgttctgcatacaagtcttagcttaggaaacatttggttcttaccatcacagccaggttcacagaggctctgatgctttttggttgattgctggtgagaatggccggcggtggctgcagtggtagcctgaggaaggccaagctgccctccctgggaatcactcagatgccccaagatgtccgttgggaagctcccaggacagcactttttatacagaggacaccgcctcggccccacgtccttagaggccagagcacatctgaaaactgcaatcacagccgtccgctggaaaaacgtttcgaagcacagtggccagcgagcgagcacgtggctactccctgttgcatgtcaaatccacacagatgtcagcggcagctgctcggcagcccagccctgggcctgggtgggttcatgtccaatcttgttcgatcactagatgattctaacatcgaaataaacctctttttatatggc

SEQ ID NO: 16353 - DNA, 537 bp, Homo sapiens
tgttcactctcctcccaaagcaaaccacagccaagcctgtctgagctgggagtccccttccccagccctgggtcagcggcatcctcagtcgttgttacttactcagctgatgtcacagtgcagacatccaccgttccaccacagaaccagtggctgagcggaccaacgttgccatgtgcgtttgctctgtggggaacagagcacagagggtgagcgacatgtgcagaacggccccttggctgcagttaggacctcagtggctggtatggccaagctgctagaagatgctgctgtccctgtgatcccagcagccctcccttcaccgtgacccctgacctttgtcaggaaggtgcagtttttcttctcaatctaaatgcctttcaggtgggccgcttccttggctacctggttccagggggctgttttgtaatgagatgctgctggcaggccactcagaggctcccagctgggttggtgggacagccaggccagatgacctgattccagcaaaaataaaactcagatttgggcaaaatg

SEQ ID NO: 16354 - DNA, 189 bp, Homo sapiens
ggcaggggacaccttggctcctcagcagcccaaggacggcaccatccagcacctccgtcattcacagggacatggaaaaagctccccacccctgcagaacgcggctggctgcaccccttcctaccaccccccgccttccccctgccctgcgccccctctcctggttctccataaagagcttcagcagtt

SEQ ID NO: 16355 - DNA, 132 bp, Homo sapiens
cagcccccgggtctgcacctccagagcccaccctaccaccagacacagagcccggaccacctggacctaccctccagccatgacccttccctgctcccacccacctgactccaaataaagagcttctccccc

SEQ ID NO: 16356 - DNA, 224 bp, Homo sapiens
ctcacctccgcctccaggaagaccagactcccacccttccacacctccagagcagtgggacttcctcctgccctttcaaagaataaccacagctcagaagacgatgacgtggtcatctgtgtcgccatccccttcctgctgcacacctgcaccacggccatggggaggctgctccctgggggcagagtctctggcagaggttattaataaacccttggagcatg

SEQ ID NO: 16357 - DNA, 985 bp, Homo sapiens
gccagccctgcacggagctcaggccaccaagcccggggtcctcaggaaggacgtggaggagcgtgtgaggacacggtggcactagcgtgaccctggggatggcacactctactcaccatggctcctgggactccaccctggaaaggagcccctcatgcggggggagggccagctcacccctgggcacctgcaggctagtgaggagagttttttaacctatttttacacgtcgatgcagtccacttctctttacacagatgtaccgcaactcgtgaccagggctggctgggagggcaacgcagggactggacgccctacagggccgagcccaggctgtgctggagggtggggctggggtgcatggggaggggagcagaacccagaacccaggagccccgcgtgggccacacccaactcagagccggcctgagcgttcacggccaggcagcctcgcttccttgcagccaagggctgggggccagggctgctgttctgcactctggggtgggtgagggggaccctgggctgtttgctgtcccaagccccttctggaagttagaagcagcaaagggcccggggaagccgggcatgtgagaggggtgcgtccccaggtcccccagagggccctgtcgccgaggacctttctgaaggaagcagaagacgccatttcctctacttcacactgaactgtcccagccactgcatctagggggcattgggcggaagatggtgcatttccatggaccattttacacttaccttttaaagcaaagcctcattttctaaacccctgacttgtgaagcacaattcagcctccgggctgggccacgtggagagagaggatcttctcagcaaggcgagatcccgggcggcggctgacatcaggagcgccaccctgcgtcctttgctgctggttccttactggtttgtacggtcagcgctggaaacttctattaaatggatgcattctggaggcatgaagtt

SEQ ID NO: 16358 - DNA, 496 bp, Homo sapiens
aaccgctccccggcctgacagacccagggagctgcagctggagcccgttcccgtgcgtgttagtttggacacgaatttagtctaaaaagctgtctggttgtataaacggtgcaaacaatgtcgccacagcacccacgcggtttgcattcttttggaactcaatgtgccgatcagtggagtcagtatcgagcctgaccaccgcaagccaggaagcaggtgaagtgcccagcgctggagtgcagcgtgccacgaggagggcggtcggtgcttccctcctcgggctgtgggcacatggggccccgcaggttccttggaggagccctgagctgggaggcagcaaaggctgacctatcaaagcctcccggaggccaccgtgctgggtaccaggactcacctctgacaagcaggagaaggtaagggcccggtcagctccaaggagcgcgctccacgcgcgtgcacacagcttccctggtaataaagagctggcatctttctt

SEQ ID NO: 16359 - DNA, 1006 bp, Homo sapiens
gctatgggagagaccatagctgcagaaaccaaccctgccctaggcataaaatgcaaggtctctggacctcagggcagggatgttagacagcggcttctgttggctcctaggggtgtgaatcaccacatcacctgcagggggcgcggctgtctttcttccccctcttctccctaatcctgagtgcacggagacagctctcagcagtttgtagcctgatgtggagtggagggttcctgcaccctacacccgagcccatccagcctctgggccatagacccttccgttgaaggcccagcctgcccctgagacgctgtgtgccctttttcaacttccttagtctctgagcatcaggtcttcatctctaagatagagcaagatgagcacctaaacgtttcagggctgaaatggggttgccaggacaacaagcatggcaggggcgaatggggacatcaggtgactgactgcgagccagcagaggcctccacccagtgctgggaggtgtcccgccggtggtggccatcactattcctggtggggctttgctgcttttgcctgcagcatccgctggtttctccattctccaagtctctgcccctgctcacacctggaggctggacacaagtgtcaccacttccctgaacccccctaggtgggctggaatcagcatctggtgcaaagctctgtgaccactgctgtaccacattatgcagagcacacaggacaggctggtgcacctccaggctgtgccaggaaacccgctgcctttgcgtcaccacagccttggtcacagcgtgaccttggtgcctccgacgggtcagctcctcccattagccatgctgtccagcacgggggccgctggtgcttgctgtgagactgagctgggctctgagtgtaaactacatggtaggttgtgaaggatgcaaatatcgaatcaatcattttttattgcatattaaaatgacaatatcttggatgtatcagattaaacaaaatactatttaatttt

SEQ ID NO: 16360 - DNA, 391 bp, Homo sapiens
ctgcccagcgccccaggctggactgagcccctcacgccgccctgcagcccccatgcccctgcccaacatgctgggggtccagaaaccacctcggggtgactgagcggaaggccaggcagggccttcctcctcttcctcctccccttcctcgggaggctccccagaccctggcatgggatgggctgggatcttctctgtgaatccacccctggctacccccaccctggctaccccaacggcatcccaaggccaggtgggccctcagctgagggaaggtacgagctccctgctggagcctgggacccatggcacaggccaggcagcccggaggctgggtggggcctcagtgggggctgctgcctgacccccagcacaataaaaatgaaacgtg

SEQ ID NO: 16361 - DNA, 261 bp, Homo sapiens
tggggcagtgaggggcctggccacccttcctggagctggccaggtgccagggtccaaccctccctcaaggaatcctgtcagaagatgtgaaatgcaactgtgttgcaaaatcactcccctaccgtcagggctctggattccagcaccacagacatgagaccccagctcggagcaaaggcggacatggacatcccggcaggagagtcctccaagggggtttgttactctgaagaacgtaatgtcaataaacagcttttatgt

SEQ ID NO: 16362 - DNA, 485 bp, Homo sapiens
gagagctccagcaggggcacagaggattgggggcaggaggagtctggaacacagccttcatgccccctgaccccaggccgaccctccccacaccctagggtaccccagtcgtatcctctgtccgcatgtgtggccaggcctgacaaacacctgcagatggctgctgccccaacctgggacctgcccaggaggttggagcagaaagggctctccctggggtggtgtttctcctctagggtattgggatgcatgttctgcactgccagcagagagggtgtgtctgggggccaccacctatgggacacggggtcgaaggggcctgtacactctgtcatttcctttctagcccctgcatctccaacaagtccaaggtgacagctggtgctaggggcgtggggttaataaatggcttatccttctctccacccaagtttccacctgaccaggtgaaaaacaaatcagaagggtaagatgatgacaggtca

SEQ ID NO: 16363 - DNA, 665 bp, Homo sapiens
gccggcgtgggcagtggccgccctggggcggggggcgtgcctgtcactgcctggggaggcatttgcctctgtaccatcgcctttgccgctgccccgtggctgccgtgtgcgcttctgagctggaagaggccgggcattggtggtccccaggctgggccctgcaggtgctgggccttcaggcccagtgtgagcctgctctgcaagaagggaggggacagctggcttcagccaggctcggtggacaccctggccctctcggggcagagccgccagtgtttctcagggatgtgactgaggcccaggagggacctgtgagggtctgtttacagaggctgggcaggggccgcttggctgtggggtgtgcgctgccccggcacctgcttgccctccgcgctcatctggggccgcagcatgcctatggttccgcttccggccgggagccctgaacacgggtgtgcagactcaccctaaagggcggcccaggccccacgctagaaggctggcgagaccgaaggcagcatgtgaggcctctcctgggagtgggggttgtgtttcccacagtggcctcagctgcgcccccgctcaggtgagcccgaaggcaggagccgggaggcactcctcccaaacactccactcagaccataaagcactcctgtttcactctg

SEQ ID NO: 16364 - DNA, 191 bp, Homo sapiens
gcactcccagcccggggcctgctgcctccagcagccacttcagagcccccgcctttgcctgcactcctcttgcagggctggccctgcctgctcctgcggcagcctctggtgacgtgctgtccaccaggccttggagacaggctagcctggccacagaattaaacgtgttgccacacctgccggcttctgaa

SEQ ID NO: 16365 - DNA, 194 bp, Homo sapiens
accaccccagacaaggccccgcttcctcacgtgacatccagcacttggtcagaccctagccagggaccggacacctgccccgcccaggctgggacaggctgcaggtctcaggatatgctgaggcctgggcgttccctgccctgtgctgactctgttgctctgtgaataaacaccctggcccatgagggcagccc

SEQ ID NO: 16366 - DNA, 713 bp, Homo sapiens
ctgccccctactggtgtctgggggttgggggcagccaggcacagccggctcacggaggggccaccacgctgggccagggtctcactgtacaagtgggcaggggccgcgcttgggcgcttgggagggtgtcggcctgcagccaagttcactgtcacgggggaaggagccaccagccagtcctcagatttcagagactgcggaggggcttggcagacggtcttagccaagggctgtggtggcattggccgagggtcttcgggtgcttcccagcacaagctgcccttgctgtcctgtgcagtgaagggagaggccctgggtgggggacactcagagtgggagcacatcccagcagtgcccatgtagcaggagcacagtggatggccttgtgtccctcgggcatgacaggcagaaacgagggctgctccaggagaagggcctcctgctggccagagcaaggaaggctgagcagcttggttctcccctctggcccctggagagaagggagcattcctagacccctgggtgcttgtctgcacagagctctggtctgtgccaccttggccaggctggctgtgggagagggtctggtcccacgccgcctctgctcagaccactgtgtgggaggtgcacagcacagcctgcgggtaaagtgtgagagcttgccatccagctcacgaagacagagttattaaaccattcaaatctctgtggtc

SEQ ID NO: 16367 - DNA, 186 bp, Homo sapiens
ggccggcacacagctccagtgctgagaagtcagtgccccgagagacgaccccaccagtggggtgcccgctgcctgtcctccgtgaaaccagcctcagatcagggccctgccacccagggcaggggatcttctgccggctgccccagaggacagtgggtggagtggtacctacttattaaatgtctc

SEQ ID NO: 16368 - DNA, 97 bp, Homo sapiens
aggatgaagcagctcctgtccggcccagccctgcctcacagctgtgcgagctctgccctcctcagctctcaaacctgaataaatgcaccaagcccag

SEQ ID NO: 16369 - DNA, 163 bp, Homo sapiens
gactccccagggctgaagctgggatcccggccagccaggtgacccccacgctctggatgtctctgctctgttccttccccgagcccctgccccggctccccgccaaagcaaccctgcccactcaggcttcatcctgcacaataaactccggaagcaagtcagt

SEQ ID NO: 16370 - DNA, 747 bp, Homo sapiens
cttacccgccctccccaccttcagctcgagcgcccgagctgtttcccgaaggcgcccagaagatgcagctactggcgccccaagtgggcctgagccccagccagggcgtcctgctgccgaagtcgggtgagcggtgccggcagccctgctgggagggccaggccccgggtcacacccctgctggaagggccaggccctggtcactccactgatctcagattcgggacagaagtgcccggggcagacccagcctgtctgggtcgggggagggcgagacgttgcccaggccggtgttcccaggaggagatcgccttggggcaggtcgggggcctccgtcccagggaagggggcgcggggtggcgcctcaggctcgatctctctgcagaccagtgtgcgggcgcgctctcccgggtgagtagaccatggccatgcggagccgcggaccatgggccctcccagctcggtgggctgcaccgcggggccctctaccttcggggcagctagggacgacagcgggggtgatggggcacccgggcggatccgagccgcagcagcctggggaaccgcggggctgcgcgtcgggagggggcggaggcaggggacgccgcccacctgctccttgttttgcagtgaggggtccagcccctgagtgcccgcaggggtcagctgctccgtgcgcccagccctgcccaaagagccccctccctccacaccctggccccaagcgcaataaacaccctgaatgcc

SEQ ID NO: 16371 - DNA, 170 bp, Homo sapiens
aggtgcagcacaagcgtggccccgcggggagtccgcctatgaggggagaggcagtctttgaggcccccatcagagaccccccgccaccacctccacctgcctgtcctgggccaggactaacacggctcctcaaattccttccctgtcaaataaacagctcccttggttgg

SEQ ID NO: 16372 - DNA, 1728 bp, Homo sapiens
ctccctgggtttgtgcggacccaggcaggcagccaaccccagctccgtggtgtgtgagcatcgtgatgatcaggacacaagctcttccccgctgagccttcactgtgggccagcttcccggtggatgcccactgaagaggcctcaacccagtgggccccactccagaccaagagcagaccattggccagctgccccctgcagacagcggcacccggggcagcagcaaggtgaggggcacccagccccagccccaggggcgtctcagggagcgggctgagcctggctgtcttcctgagccccacctgcttcatgggttggcttgagcaaggcagtccagatgcgtgtctcgagcgctccctggcggcatgctgcaaagctacatggctccggcaacaaggaagactgcccttattctcagtaacaggtggagctgggggctggagagcccctcggacctcgccttgggaaagctgggtgggtgcacggagcctggcaggtggccaaggggacccccaagtggagggattggtcgaggggcagcacagggtggtgcagtgggtgagctcagcccctcccctccaactctcatcccattgagccccaaggcgtggggggatcacgtctgtccttgttctcctccaggtggagctgctgggtggggctctggtcctccagggacccactctgcaccccaagttttgccgggacccgctcctctgtgttgtgtggctgtaggggagggctgcagccagggactctgaacccggggccggcccacccagccacccagggtggggaacaagatcgcctcccagggccagaagctggggatgtccttgcttcctaggatgttggctaggggatcacacgccccacattctgggtcaagcatggtcctgccccagcatcttgctgggttgggggcatctctgcacagatgagtgccaccccagcgtctccgccagggtctgggcatgtcactcttgggcatctgtgctcaggaggtcaccaggtgtgggcagggcaccaagcagggaggtagccgaggctggaagatgcacatcagtgccccgctgggcttcctcaagtgggaactggtggagggggcgctaggctgccgggccagggtcagcaggctcaggccggctcagggctcagagttgagccagaaaccaaggtgaaatctgcctcttactgccgccagggcccttgggacagggacaggaacagcagaaggtaaagtggaaaggaattgagtaatgggcccccaggcaaggctgagccaggccccaagcccaggattggggtctccagagtccctgggggccccagggcagctcacccacagcctggggcctatgggagcaagggggctcctgatgggtgggggcaggagcttggacaaagttgaaggccttctgtctgaattggccaggggccaatgaaagccaaaaagctggtgtggtggcttatgcctgtaatcccactttgggaggccaaggcgggtggatcacctgaggtcaggagttcgagaccagcctggtcaacatggtgaaaccccatctccactaaaaatagctgggcgtggtggcaggcacctgtatgtaatcccaaatactcgggaggctgaggcaggagaatcacttgaacctgggagatggaggttgcagagagccaagatcatatcactgcactccagcctggctgacagagtgagaatctgtctc

SEQ ID NO: 16373 - DNA, 1810 bp, Homo sapiens
cccgcccagactgtccccagactcccccgagacctgccagccccggcatcctggaagtcccgactccccccagacctgccagccccggcgtcctggagctgggggctacagcccagcctgagctctgggtgggaaagcagcctgccccatgcttccagcctgcagaacacagaatgaaacatgctggtagactccacgagggcagggcctctcctgtcgcctctggacacaagtggcgacagcctgctgggggctctgtggctccattcctggctgtggggtctagtcaagaggcagagggacttgggacctgggagaatggggctgagaggaggcttcgggttggggcccaagggaggtgtggtgtcatctggggagaacaggagggcatgtccctttgggagcccgccttgtggatccaccacaccccaccgagcactagaagctgcataagctacacaggatgtgcttctgcagcctacagatgcagaaccagaatgagggggacaattccacccactcgagggctgccccctcttccttagcagacgaaccagtaatgggggcaaggctggggcatcccagcccacacaccctggatgcccagcaaggccacagaaagagcctgatgtccatgatccaggtggctctgagaagcttggcctggacacctgagcctgcggccggtactcctgccttctccccatctatccccaaggcctctgcctctcagcctcttccatggtcggtttaggctgctgagttttctgtgcttccccaagaaccagtgggatcaatgccggcggcctctgtgatggttgctgactaatccgggatttcatgagtcagaggcaccacccctcaccccagctgcctgctgcttctgacggatcttggtgctcaggctgcctggctctccgagtgaggacgcagcctccatatttggtgcactcaggcatggctgggacaagccagctgccccagggttcttcccctggtgattctcgcctgctttctcatctcaggggaggcagtggcacctccctctccctgctgacatgaagagagctatgatatgccactgctgccaactcatcctctgcccccacctcgaaacccacagtccccagtggagggccactactcatccccattggtttcccaggggaggggtgttgtctggaagggcaggttcagatgcagccttccagatttagaggcactgggaggacagtggctgagtggaggcgcccagacctgggcaggcagcaggctcaggcccacaccttgtgatttttgaaaccaaagcccagaagatgatgtttacttctctctccctggctctgcccttcttactgcaaaccatgctgtgccttagggcccttctcatagctgttcctcatggccatgactggaacagggatgcaacctctttctacacaagcacagttagttgggtgaagtctttttttttgtttgttttagacggagtttcactcttgttgcccaggctggagtgaagtggcgtgaccttggctcactgcaacctccaggccagcctcagcctccctagtagctgggactacaggcacccactaccacgcctggctaattctttgtatttttagtagagatggggtttgaccgtgttagccaggatggtctcgatctcctgacctcgtgatccacccacctcggcctcccaaagtgctgggattataggtgtgagccaccgcgccgggccggttgctggcatcttaatgttctgtaggtggaatatttccaataaacacaaggtgccgtaattgac

SEQ ID NO: 16374 - DNA, 596 bp, Homo sapiens
ggtggatggctgctggtgtggggacttcgggtgggcagaggcaccttgctgggtctgtggcattttccaagggcccacgtagcaccggcaaccgccaagtggcccaggctctgaactggctctgggctcctcctcgtctctgctttaatcaggacaccgtgaggacaagtgaggccgtcagtcttggtgtgatgcggggtgggctgggccgctggagcctccgcctgcttcctccagaagacacgaatcatgactcacgattgctgaagcctgagcaggtctctgtgggccgaccagaggggggcttcgaggtggtccctggtactggggtgaccgagtggacagcccagggtgcagctctgcccgggctcgtgaagcctcagatgtccccaatccaagggtctggaggggctgccgtgactccagaggcctgaggctccagggctggctctggtgtttacaagctggactcagggatcctcctggccgccccgcagggggcttggagggctggacggcaagtccgtctagctcacgggcccctccagtggaatgggtcttttcggtggagataaaagttgatttgctctaaccgc

SEQ ID NO: 16375 - DNA, 1228 bp, Homo sapiens
gactccccgcccgccctcctctgccccctcccccgcagacagacagacagacggacgggacagcggcccggcccacgcagagccccggagcaccacggggtcgggggaggagcacccccagcctcccccaggctgcgcctgcccgcccgccggttggccggctggccggtccaccccgtcccggccccgcgcgtgcccccagcgtggggctaacgggcgccttgtctgtgtatttctattttgcagcagtaccatcccactgatatcacgggcccgctcaacctctcagatccctcggtcagcaccgtggtgtgaggcccccggaggcgcccacctgcccagttagcccggccaaggacactgatgggtcctgctgctcgggaaggcctgagggaagcccacccgccccagagactgcccaccctgggcctcccgtccgtccgcccgcccaccccgctgcctggcgggcagcccctgctggaccaaggtgcggaccggagcggctgaggacggggcagagctgagtcggctgggcagggccgcagggcgctccggcagaggcagggccctggggtctctgagcagtggggagcgggggctaactggccccaggcggaggggcttggagcagagacggcagccccatccttcccgcagcaccagcctgagccacagtggggcccatggccccagctggctgggtcgcccctcctcgggcgcctgcgctcctctgcagcctgagctccaccctcccctcttcttgcggcaccgcccacccacaccccgtctgccccttgaccccacacgccggggctggccctgccctcccccacggccgtccctgacttcccagctggcagcgcctcccgccgcctcgggccgcctcctccagactcgagagggctgagcccctcctctcctcgtccggcctgcagcccagaacgggcctccccgggggtccccggacgctggctcgggactgtcttcaaccctgccctgcaccttgggcacgggagagcgccacccgcccgcccccgccctcgctccgggtgcgtgaccggcccgccaccttgtacagaaccagcactcccagggcccgagcgcgtgccttccccgtgcggcccgtgcgcagccgcgctctgcccctccgtccccagggtgcaggcgcgcaccgcccaacccccacctcccggtgtatgcagtggtgatgcctaaaggaatgtcacgc

SEQ ID NO: 16376 - DNA, 449 bp, Homo sapiens
ccagaccacgggcagggcctgcctccgtgtgcccctcagctcagccccagcaagtgtgtgctcagagcatctttgttcttcacggcagcagctaccttccctcactgtctcaggtgccgagaggggcaggtgccagcctccactggcatcagtgacaagcccagggcacagcccacccgggggtcctcgcttcatgctcacacaggctatggggatggtgggctccaggtcagctctgcaaggggcttgtctctgtggcacccacactcctgccctgccagggaggctctggttgtctgagcaccatgggggccccctcaccttgtccctcctcagccagcagaggcccagggcaagggacaggaggacaggggttctccttcaccacagaacccaaacctcaggtctcacccctgtggcctgtgattatgaataaagattatctttgt

SEQ ID NO: 16377 - DNA, 592 bp, Homo sapiens
ggcccgcggctgcccgtgccccctctgacagccatcctcctgggagcccaggaaggcatccacgagggagctcctggccagcagccgtcatcctctcggaccagccagctggtcctctgggaacagccagctcccgagcacagccgcactcctgttgaccctggatcccaccctttgagcctgaccccactgcagcctctgcccagccagccctgcgctcccccaccctgacagtgagctgtgtcctcgtccccccacccccttcccagtcaaggtggtggcctgggccgctccacctcaccggtgcagtgacccaggacggcatcagcagcccagtgagcaccaggggtggcatagggcacccatgaggctgcgctgcactcctctgccctggggccacctcggctgctgcagcctgcccagcagcacattccagtcactgcccccgcactcccacagggctcaggctgggctcagaggccactgagatgccagctccttgagagcagtgggggtgtcccaggccagagcagcctcttcctctcctggtcccagaaaaacccttgcagtaaatggtggcctctgggtggtt

SEQ ID NO: 16378 - DNA, 254 bp, Homo sapiens
cccagcccaccctgccagggccaggacccagacttcagcaaatgtggctcacacagtgccgggacatgccgggacatgcggggtggctgttgtcatgggcgtctgccccttcacaccaggcactggggctcagacccaccaggaaggtggccgttcagcccgagctcctgaaacggaatcccaggtcctggctggagagggacacccctgattaccttaaggcccaggcaataaagcagggtgatcttcctccc

SEQ ID NO: 16379 - DNA, 138 bp, Homo sapiens
cgggcagttgctgagcagaccgccccaccctccccggctgggagggctctggagggccctggagggggggtccccgcggcagctgacctccggtcacctgcttccccttctgtgcaaataaaccaggctgttatctgg

SEQ ID NO: 16380 - DNA, 151 bp, Homo sapiens
agccttcagtcactggggaaagcagggaagcagtgtgaactctttattcactcccagcctgtcctgtggcctgtcccactgtgtgcacttgctgttttccctgtccacatccatgctgtacagacaccaccattaaagcattttcatagtg

SEQ ID NO: 16381 - DNA, 237 bp, Homo sapiens
agccagctgggcacaacctgcttggcccggccaccgagtggaaccatggcctcccccggggctttcccaggcctcccctgggacttggggccccagcctggccttctgaccctctgggcaccccgatgcacccttctggctggccaacccttctatgggctgtggacaaggctggcccagcctggatcccccatctgcccatctccccgctacactgagatgctgttggttttcccg

SEQ ID NO: 16382 - DNA, 611 bp, Homo sapiens
gggccctccagacctgctcgggtgctggggccatgccgagtcgcggccctgctcagccggaagaggctcccggacctggatgtacagggcagtctctcttcccggggctatggctgggcctgtcctgccgtcatggccccctgcttcctgctccttggagctggctcccggaccttgcccaccatccatgcagtggctcccagggcagagcctctccttgtactttggcagccatagaaagcgtgctcattttctgttttcctgtgttaggaaaaaaccacctgttttccaaggggagagggcggggcctgagggtgggggcggggcctcttcattggcccagcttggcgaaagcgaggcacactgcttactgccttggggttgtggagatggacccgtgacctcgtggaggccgtgtgggggcagcagcctggcctgtgccatggtgggtgtcctggggcctgtgcggagggagccacctcaccctgcagcccagtttgcaggtgtggccttgtttctccttgcccagcagtgctgccttcagcggccgtgacggggccagctggacacacggtgagattttctcgtatgtaaataaaaggcattttggt

SEQ ID NO: 16383 - DNA, 2679 bp, Homo sapiens
tggaggcgcaggacgggacgtttgggttgatggcggcagtaggagggcgaccagggaccttgtgggctggtgcaggcccctgaggtttctagtgaatttgtggctgcccggctggtgggtgcggatcagcttggagctctgcttccaggtccacacccgcctcagagtccggagtctgtccctgggggcggcaggacagcagccacctccctcccaaacttgcccattgccctgctgggcgtcccaggcatggtctggtgcgttctccctgtggccccaagaggtgggttcccatggtacaaggatgatctcagggccaacaattcccggggtcacacagctgggacgtgaccccgcctcttgggggtggtcgcgtgttgctcagtgctgaagtggggttctcattccggcccccctggagatgaccccggaggaggccacagccaaccatgacagtgctggggctctggctgccttctccacccaccccacccctcactcaggtcgtgttttcaggagctcaaggctggagtgtcttgacagtaaggggaggggagcggaggcggaggcgcctcaggcagcctctccccctccttcctggaccccccaaccccgggcccgccagccctggcttgggcttactgggtgaccgagagcccgcggggcaagcgggaggtgcctaggcctctccccatccccctcttctccgcacgtgggacccttagcccgtggccagtcccctggtcaccacgattgcgcgacctccctttccctggggccttttgtgccccgagttccgcccacccgcaccctctgcgcagagcgccctccccacgccagtcgaccccacaccccacactccccacgcgccgcctcccggaagccctcctggacgcctcccgtggatgggcccaccgcgcccacgggggctttaggggaaggtgctttgggcgttttttgcgccatgtctcctcggggccggcggttgcctcgggacggttctcgcctcctcccacagccccggtgtctgggacgcacccggcagccccgctgctgccgccttgtggcgcgcccggcccagccggtggcttctgtggtcgccgggggctgagcgcgcggctgggccctgagtcccccaggccgccccgatcctctgtccccgccgccggccccgctgcagtcccaacccgggcctgcccgggaggagcgcaggggcggcgatgaccagtcccgaaaggggctcagagggcagcgaggaggtttcacgccggtgcggggcgccgtcgaggtgggggcaccgcgaaggtggaggcggggccgcgccggaagccccgagtcgagcgcacacggcgggcgcccctggcaagtgggactcctccggccccgaggcctgaactcagcccggagaccgcgcccaccagcgccggtgtccccggaggggccccgctagttccctgagcagaggtcctgcggcttcccggagggtgtcctgttctctcccccgcctcgcatccattctcgccctggtggttggtgtctgtggtcgggggcgagggccgtctagtggagacggggattcaggccgcttgaaagtctgggatctctgggcggatggcagcggctccgcggagctcgagctcggcgcgcaggtcctgggcccagggcgggagcgctagcgagagggctgccccgtcctgcccagagggtcctgaggactcccgctgctcctggagtcttggggaggggtccggctccacggggtgggggtgggggctaccaggaaacctttgcctcctggggctgtgcaggaccggctagccagcgctgggaaccagggctgagttcagcccagctctgtccaccccaaccccagggctaggggaaggagctgggagaaggagccccacctctcccaggcgagtatctgtcccaggagcccacacagagggacacccagctctggtctggccttcgtgttggcttcaaggtggtaacagagagagctgcagagtgggggtgtgtttgccagtccctgcatgggtgaatgttggggtgcccactgctccccaggcaggacccccaggactgtcagctccccttcccacagagcacccacctggaggtgtcacctgccggcaagcgtgggccattcatccacctgtcagtcaacaacacccgctgagcatcggcttgtatcaaaaggtccagacctaaggggaaattttatctctttctttctttctttcttttttttttgacacagagttttgctcttgttgcccaggctggagtgcaatgacacgatctcggttcactgcaacctctgcctcctgggttcaagcgattctcctgcctcagcctcccgagtagctgggattacaggcgcccgccatcacgcccgggtaatttttttgtattgttggtagagacggtgattcactatgttggccaggctagtcacgaactcctgacctcgtgatccgcccacctcggcctcccaaagtgctgggattacaggtgtgagccaccgtgcccggcctctttttatttattcctaaaatattaccttgaggccaaattctgcgcttaaggagaatgtgcaccaagtgctggggtgggggctggtaataaacgaggccacaaatcatgcttgttaataaattgtgtggttcaaatctg

SEQ ID NO: 16384 - DNA, 45 bp, Homo sapiens
tgatgctgtgtccatgatgcttttaataaaaacaacccccactgc

SEQ ID NO: 16385 - DNA, 59 bp, Homo sapiens
ctgggcgggggaggggcggcctgccctcatctcatttctattaaacgcctttgccagct

SEQ ID NO: 16386 - DNA, 221 bp, Homo sapiens
ccccgtgctgccttctccaggcaggcctggcctctgccctgggactggggcgcccagggcctcgtgccttctctcttggcctagcctggcccactcaggacctgcccagcctctgccagctcctctggcatccgccctcttctccctggggctggggtgggggtggcagggagctgggacctggagagacaactcctgtaaataaaacactttatttgtag

SEQ ID NO: 16387 - DNA, 1171 bp, Homo sapiens
gacgccgccggccagcggggcgctcgggagccagggaccgccgcgtcgccgattagaggacgaggaggagagattccgcacgcaaccgaaagggtccttcggggctgcgccgccggcttcctggaggggtcggaggtgaggctgcagcccctgcgggcgggtgtggatgcctcccagccaccttcccagacctgcggcctcaccgcgggcccagtgcccaggctggagcgcacactttggtccgcgcgccagagacgctgggagtccgcactggcatcaccttctgagtttctgatgctgatttgtcgttgcgaagtttctcgtttcttcctctgacctccgaggtccccgctgcaccacggggttgctctgttctcctgtccggcccagactcttctgtgtggcgccgccgaagccaccgttagcgcgagctgctccgttcgccctgcccacggcctgcgtggctggggccgagtcccaggggccgcacggagggcacagtctcctgtcaggctcggagaggtcaggagaccgaccccaccactaactttggagaaaatgtgggtttgctttttaaaggaatcctatatctagtcctatatatcaaacctctaactgacgtttcttttcgaggaagtggcttggtgggtgcagcccccgccggttccgttgacgctggcaccttctgttgattttttaagccacatgctatgatgaataaactgatttattttctaccattactgaacattaggacaaacacaaaataaaaaacaaaacacagacaacggtgctgattctggtgtggtttctactcaccacgtgaaataaactatcaactgtataaagagaacaaagtgattttagaataaaatgcaggaaaaacttttttaaagatgttagtcttgtagcgtgaataaatttgccatcaccttttgtgtggtggcctggcaggtcatatacttttttttggcatatacctttttaaagactgtaattagtgcagtaacagtggggttttttttgtgcaactcttctaaaaacattcataatgcagtcatgtttatttttttctgttaaaatgtttttgacagttttaagagcagtcttttggctctgaccatttcttgttctgtttccaatgaaatcaataaaaaaaaagaagtacttt

SEQ ID NO: 16388 - DNA, 565 bp, Homo sapiens
agccaggtgggagtggggagcgacccgcagctgctcactccaccttgcgcggcccatactgggcgtgtgcatctgaatcccgctggagagcaaacacgaacttctgttccctgcaaaatggttagaaagaaacagctggattacgttcctctaaaaaccacctgaacgtaaccttcgcagggcgtcaagtcatcttttcttgccttcggttgtggcttctgtggctttcccgatttgcacatgtcctggggtactatgaacgtgagtggggtattttgttctggcattaaaagaaaaacaagcaagcaaacaaaaacacagcctccgatgccaaacatgttcccccttcttcacttccttggaactggaagtattattcctaagtctagtgcaaaatgcttctactctctgtgtcttcctgatagggatgtttaatgtaagtaggatattaatttcagaacattgatttcttatctgtgtgtctgacgtgccatctttaatgttaaaattaaggtgttaaaattaagcctagttatatagacgaaataaaatgctaagtcactac

SEQ ID NO: 16389 - DNA, 429 bp, Homo sapiens
cactagaggcatttcttatcaaaaggattggataataaaaataagtttctactgggtatatttcaagcatttatttattactttagttacgaattccaatatactttaaaatggtatttgttttacagcatacataaaatgtagcaaatcagtactgtaaaacatttaacattcatacagttatatataatatccttttttttaaagaatggtatttcacaaaaatatcttttgaaattggctttggagtttacatatactgaacatgaaagtttataataatgatgatacaactttcaacattgtcattttttcttagaacttcagctgattgcagagatataatgattacattgttattaaatttttttaacacaagtaagtgtcaccattttatgacatgaaataaaaggttatgactgttattga

SEQ ID NO: 16390 - DNA, 1047 bp, Homo sapiens
ggctaggtgttattaagggttgacaccattctcgaagaaggcagccaaaaaaaaagacaaaaaagttagtggaatctatcaggattcaaatcaacttttgcaagcaatatgcccatcatccttcctgagacactaaataaatataatggattcatccaaggaataaacattatgagttctcaaaaaatgttttcgtcacaacctggcgtgaatgcttttctccggagaaacactgaaggcggcgttcttgcgattcaagggtacgctgcgtccaggtttatttcagtttcagactgaggtctgctaagaagcccggcctcaaactcaagataaaaacagaaaagtcccagtgttgacgggagtggaggagcccgtgttcgcttcaaggtgccggcgtgctgctctaacctgtgctatatatactcgagcactctccatataatgcctccatttaccaacttgctcttaaaaaataccaaagcaggccgggcgcggtggctcacgcctgtgatcccagcactttgggaggccgaggcgggcgcatcacgaggtcaggagatcgagaccatcctggccaacgtggtgaaaccccgtctctactaaaatacaaaaaattagccgggcgtggtggcgcacgccttagtcccagctacttgggaggctgaggcaggggaatcacttgaacccgggaggcggagcttgcagtgaaccgagatctgccactgcactccagcctggcgacagagcaagtctccgtctaaaagaaaaaaaaaaaaacaaccaaagcgaagtatttttggttcaaacctgcactatttaatatgatagccactagccacatgtggctattgaccactcggcattatggttagtctgaattgcccactgctggatgtgtaaaatgtacactggaatttaaagacagcgcagaaaacatcgtgtaaaatgtcttgttaatgattttcatgttgattgcatgttaaatgatactttggatataaaaaatatattattaaagttaatttcacctgtttgttttcccctttt

SEQ ID NO: 16391 - DNA, 176 bp, Homo sapiens
gtggaaagagttaagagcaagatggaatgattttttctgttctctgttctgtttcccaatgcagaaaagaaggggtagggtccaccatactggtaattggggtactctgtatatgtgtttcttctttgtatacgaatctatttatataaattgtttttttaaatggtcttttttaa

SEQ ID NO: 16392 - DNA, 839 bp, Homo sapiens
attcctctgttcttatgtgcttaatcaaaagattctaaaattgtggattatatcatgtgaaagttcatggaatgtgtctctatattatacaggtacctatgtaaaagaaaaacttgagaaccactggaatatgaaaaatattttaagtgggaaaaagattggtgctcctgataaagcaaagggctgggaatacaatggaaaggattaaatatgtattttgtagactctttcccggtctccaagaacaaagtaaatgattctattttagaaggataaaaatggtaatgatgataactaacattttttggacacttactatgtgcgaggcacagttctatgttttttacatgtaataaagcacttaatgcaagtctttgagatacgttctactttattctgttttacaataagcatccgaggtttatgcagaaagctaaggcacagaaaggttaaatgattactcagctaaaaaatggtagagatttttttttcaaacacagtctgattttcaaacccatatgcttctaaccactaatgatgtaagggggaaaattctcttcttcagaatttctgaatagtcatcaaaatggcttatcaaaaagcttaaactctgaatataacaagggctggttaatataatgaggaatagatgcaaatgctcagatggttcagcactggcttattttgttatattgaatgcaggaggcgggggtagtttataccttgtcgaatcataccagattattaaatgtgacaaattacccaaggcggtaaaaaagacatgttcacttttaagctatgtgtatgtgcttatataaataaaaaagagtgaaaacaga

SEQ ID NO: 16393 - DNA, 393 bp, Homo sapiens
agaatattaaagcgtatttttccagcttacattaaccctgttgatattgggcttaagttgaaaatttaataagcctgaaggtcgactgttgtcaaattctatctgtgctgaacattaactttttggagttgtgaaatggaatgggtgtatgtattttgccagatctttttttttaacgtaaacaaattatttgcttcttaataatgaattttttcccttagtttcaggtgtcaagaaggatttttacaacacttaatgtcaatgttttgttttcttataattaaaaagtaatttacattttttgtagcttaaaatattttattgttgattgttagtcttggtgtatgatttcatgtgtaagttttttaattagatgcacttctgtgaaatatc

SEQ ID NO: 16394 - DNA, 4144 bp, Homo sapiens
aagctctcttggccactcctgcacacccaggaccttgatgttgcttgccaccttttgttttcgtactctcacagactgcttgaggaaggatgtcagcccaatcagcgggccctgcagagttactgatgttctttcagaaggcaggactgaatggcagagctagctttgcaggaatcattacagttgctcctttttctctctggttttcctggactatgtgaccaggaggactgtcttttcaaagggaatttagagcctcactctcctggatacctgttacttcctggctgtcaacccttaaaggaccccagtgaaatgatgtgcatatgaaaatgtagtttggggatgactctacctgaaaactccaaacagggaaaaagacctcaattacgagaggcatagtgacctgcctcacctaatcctcacccttgctgctcctgatgcaaagccaggcacaacaagggaaatccatgtccaaagcatagtgtggtctcaactcttagaaactccctgggtttcccttttctcttagccacatgctaaccagttgcttctcagtgtttctcttcaatagaaaaataaggttttatatgccagcagcctatccttgtttttgcattttaaagacttagttatttatacgtattttaaaatgaaaaaaaaatgtaaaggtctgtgctttggatggaaatcattattattgtaatcaccccagctatagacattttgcacagctgtggttctgcctggccccacctctagcatgttagttttgcagttagcaaaggttacctgagggaaatggagtgggcacctcccgcaccaacagtcctgtagctggaaccttcctgagttgactgtttagtaactccacctcaaagactgtgttcaaagaaaaatgttgtttgactggtttacccattgcctccactctggtgctgcacccagagaagtgccagatgtgagaactgggacagactgagtcatgtgccagcttcccttggaaaaccaaacctagtgatacttgacttccagtgctcagattttactaacgtttttcaggatatccactcatctgtctgtctcttccctacacttctctccaccctctttttgcatccctcttaccctcttcctgactgtggttcatatatccccaccagccgccattgtctgatcatcttgggaaggtagaggtgacagttctcgaaaagtctacagaaagaggcaattctttttctgagttccagtttgaaggcctggaattttcacatagcacttggtcgaaaatatcaagcctaaataggaagtcattttctgtgacacctctacatagctattacagatcctaagtcctagggcatcagctataaaaattggccagtcccaaagacacagtaagttctaacattctggtactatcatatttcaagtattttttctcactttttaaaaatgtttttctgaacaaaagtgaaacaatgccatttatcaaactgagatcattacaatcttcaacaagacaactaaaacagcttgatgttagatgggattctgtgacagtttgtatactgacaggtccttccagtctccctccacagtcccacaagcggaagtattctacctgattccagagttcattccaacatgcagtagaatgaggtgaatgaagaaccaagtgtgggttttgttttcacagtgcacttggtcaatctagtttctctgagtagtgggctgtattctaagaaaagctttcacgtagacgtcaaagtctgcaaaagagatgagttagccactttaaaaaacctgctctgctttacaaaagatgcacaccaggcttcctttacaagtgaactccaaggctgcttgtaaagtaccacccttcctgcagactttgtgggtcgtgtcacttggcctaaacaagtggcctaacatatgcatgctcacagctagtagcatccctcatgcgtcctttgtcatactctggaaagaaaaaaactctgctatcttcagagaaaccatctattcatacttaaatatggaagcctttacaaggaactcaaaatacatttcatttcatttgtacaatgagaaaaaagatgaaaaggcaaggttgttattgcagttgacattgtcagccctgccttttggctttatgtaatttaaaatagaaagggggaaggaggacaagacagaagctcaactttagaaaccatggacatcacctccctctttgagaggagctgcttgtgaaccaggctccagtcttcctgtggcctctcacagtaaccctgcccctttcttacctcacaggggcaagagggactctaaagagggcgtaagcaatagaggcacctgcagccctccttcctcagcaggaaatcaatgtggagccccagagggacattttatctcagagagagcatgctggccacaggacccagtgcagccctgcttcccgcaccgtgggtctttcctgatagctgcaggcttgagattgcagcctcaggataggacacgttcagatgccttccagactacacacactatgcttagattcgagagtctttcctgaccttaaaatttgtcccttgcttactttcacactgcagaagatttatatatatattcatcattatttttgcagcagtacaagtggaaacttcaaaaaaatcattccctttcatgtcctggtctttttaagtcttgatatgtaaccattttcataaatgtccaaacagagattgtcattccccttaaaaacagaaacaaaacacaaaactagtgcttgtgaaaacacacagcgcaaagacaattatcctattgcattaaaaaaaaaatcagtctgcctagagacatttcattggctgcattgtcttaattccctaacgaaactgcatcaaaatgtcagttgtaatttagcctctgatcagctgttaaatattatttaaatatttacaggtcctgtggggtatctcccattacccatgtcgccctcaaattacataagcgatcataaaataagaagaaaaaaaaaggtctttagtagatcacagcagagttaccactgataagagtgttggctttgttcagttgtttctaaattaccagccgtcaagcacagtagcccctaaaaccaattttgagcaaggataaattcaactccctcatctgagaaccttgactttccagttgccttgaagtattgggaatagtaactgtacattttcaatttaattatttggtattttatttgactgtcttggccatgtcattttatggaagcatttttaaatagcactttttgttagtggtgtggaatttctgcggttattatttttttttttttttgcaacagatgaagcaaaaaaaaaaaagcactcattggagaaatagtgagtgtaaaaagagatttattttgtacagacagcaaagtatcctgtgtaatgttgctgacataaagcactttgggggaaaaaagtggaaatctgttttccataaatcacacagactcttgtacatagttatatacactcacgtagagaaatgaactgcatatatcatactggatatggggccgattttactctagaggcacatctggtgcttattgtcataaatcttttaaagaattaggtacacttttttctattaatatgtatagttttgtgatttgtcacagttatgtttcatataatcataagttattttgtcttgttcatgaagtcctttttttatgtcaaaagtaaaatgaagggattgtgcacttggtacagaataaaactggaaatagagaagacgccctcctgcctaaaatcctccttcagcctgtcggtttaaaacacaatggcaaccatcattgtttgtttgtttgtttttttgttttgttttaccatcagcctcttacatactgggaatggtaattataattaaaggcagatgatgcgggagggaatgttcaagtccagctttaaaatgctgcattgctttgggccagagctgtagcctggatttaattatagatatgaggaggaaatggcagtaaaaatgaatgtctccctgagtcctttacatgttgggagtgtccataaataaaacatgaagttttatttcatcagatttaattaaagcttttatacatgtt

SEQ ID NO: 16395 - DNA, 1818 bp, Homo sapiens
ggagaaatgtgtgtaactattaatagtaagatgggcaaacctcctagtccttgcatttagaagctgcttttcctaagacttctagtatgtatgaattctttgaaaattatattacttttatttctactgattttattttggatactaaggatgtgccaaatgattcggatactaagatgcatcgtttgaaatcatctagtgtgttgtatgcagttatcctcaaaaacatcagcgatgtctgaacctttaaaacatctgttagagcaaaattaaaagagcatttggtagtaatctaactttttgttcagttaataagtggttgataaagtttccatatttttctggaaaagttaaaaaaagttacatgtcatttggagaaaatacgtaatcagaaatttgtgcatagattgatgccaaaaaagacatttccagcattgtggaacatggtgagacactatataaaattccagaaagaaagcaactggatttacagatttattgtgagacacaaattcactgctgcctttacactaagaaatgtatatgttaaccatatatgctgtatttattttgtcgttaagcatactttcagtttactcagaattttcaatttgctataaagatgtatcaattagcatatagaaaaatattactttaagatgacttgtttcctttgaaaatacctgtgtactgagggttatgatttgtgtcaaaaattgacataagtgcttttacaagcaccaaagttgaatgaattttcaacaaaatgtaattaaagtctatgttttcagttatgactcaggttaagaaatgtgttttaggatctacttgctggtttttctttttgatccaaatgtgtgatctgccctgataaataacaagttatagtaccatctcccccgccaataaaaaagagaagaaaaaagagaaacccgtggcactatgtaaataaagtaagcatactttgttgttagtaaatagatgaggcatgcctgggaaatgctcccttggcataaatagcaatcaatcataattagtaaacaggtgtaccaataaaaagaatttacatgataggttaacaaggaccaggaaagtgagtttcctgaaggagttctttgttcctgatcaaagaaattgatacctgttagcattcactgccaccatattttaaggagaaagaactctattggtgtcgtctgagcagccatttaaaaattggaatctaaaggatggttgctgatgtactgtgtggtctggtagaagtggggaaatatgagagatggaggaaaaacttgattatgtcttccatggcatatttactcttactttacttcgtgccaaatcaaatgaaacaagccgtcttacaagtcgttattgcctttaaaaatctgttccgtttttttcccaggtacttaaaatacaagtgccagtaagtggttcttatgtgttttggggggaaaattttatttcccttttcttctgatatttaaaaaattcatcgatctttcaagatgaaccaaggttttttaaaagaaatataggaaacacttcattctttataaaactttctataatgccttatttgaatgttaatcttatgtgctttctaaaaaatgttgtgaaataccaaacttatggattatcactaggttatcaagcatatattagtctttatcagaataaaatgaaatttcataactgtggctattactttgttcttggtccttcacagggcctgctccatcccaccttcctttctgctgcctgatgtctcaatggcttctgaatgactgttctaataaatgatcttaaaacagt

SEQ ID NO: 16396 - DNA, 48 bp, Homo sapiens
ccatcttagaattttttctaacctaataaaagcttaatacatttattt

SEQ ID NO: 16397 - DNA, 535 bp, Homo sapiens
atatgatgtcagaatttgttgctaatttgccacaggagctgaagttaaccctgtctgagatgcagccagcattaccacagctacaacaacatgtacctgtattaaaagattccagtcttctctttgaagaatttaagaaacttattcgcaatagacaaagtgaagccgcagacagcagtccttcagaattaaaatacttaggcttggatactcattctcgaaaaaagagacaactctacagtgcattggctaataaatgttgccatgttggttgtaccaaaagatctcttgctagattttgctgagatgaagctaattgtgcacatctcgtataatattcacacatattcttaatgacatttcactgatgcttctatcaggtcccatcaattcttagaatatctaagaatctttgttagatattaggtcccatcaattcttagaatatctaaacatctttgttgatgtttagatttttttatttgatgtgtaagaaaatgttctttgtgtgattaaatgacacatttttttgctg

SEQ ID NO: 16398 - DNA, 282 bp, Homo sapiens
gatgaagctaattgtgcacatcttgtctaattttcacacatagtcttgatgacatttcactgatgcttctgtcaggtcccactaattattagaatataagaaatctttattaatgtttagatttttcatttggtgtgtaagaaaatattctttgtatgattgtagtttctgtaaatgacactttctatgctgaagtctttttgtctttttattaacagtataattgtgttgattctttttaatgctgttaacttaaaattacaataaaacctttgccacttt

SEQ ID NO: 16399 - DNA, 268 bp, Homo sapiens
aatcatgcttaccaatcaaatctcaaagcacagaattattgacttgaatcatggtttttacagttttttaaatgctcaagattttgatattatagattttattttaaaatattaaaatgcaagatagttttgagctattttaaaataaaatttataacattcaacacaaaatcatggaggtgctctaaataacttttagatttcctctctctgtgtgcattaccaatatctaagtgtaaaattaataaattgttttgaattcctggaa

SEQ ID NO: 16400 - DNA, 2572 bp, Homo sapiens
tcttgtggatgagctctaagtacatgcccagtggatactccatgtgacatggtttctccctatgttacgtggatgtttgtaacgtaagtcaatgaattttaatgatcatatgttcaaagagctttctgggttaacgcttttcagggccaagcactataagggtttagctgtggcgcagtgatgcatggcctgttgacacttgaaaatgccagtcttttggcacttcagcacatgtgggtactgccactacacacacgtcattttatatgaccttaaggacaaagccaacaatccacttcaatagctgcccctttaggatcaagaaagatgtacactgtcagagcattgttaatgagacaaaagttgtttccaatttaagccccaaaaccatttgttgtattagtggatggtgggtaaaatatcattcactgaggtaatgattccccttgagaatataactctgtgtaggtcactggaaagtgattgccatagggctgggagagaagcattgcactcttgaggctgtagcctgtgtcaagctgtttcttcaggcagcctctcaaatgtgctttgtctctctgtgctgaggcctggaccctgtgctgagctggtgactcactgtcctgacaagtggacacacagatgcactgctgtgctgctttcctgaggtggttttctatgcctgttttcctctgaaacatgtctgttacccctctccatcttaccaagttgaaaaggggaatatttggccacatacccctctggttttcgtaggttcttttggttcagaatattgtttgtgccagtacatgaccttaacttccttcctcagagcactgagctgccatctgggctattctggggtagaaggaaggctgggagtggtgggaattttataaatatttattctcttttctttgtttcataggagtcttgtgttatacaaggttagtccttcatggtataatcttactgatgcactgggcctatctttttgttttccagccagttgaatagattagtttttctcagtaacttactatccagcagactggctttcctgagacttgaggttgtggcttatactggaatgagaccactgtacgtgtaggtggttcagatcctgcgtaatggcagcatgaggacttaaaaggtggttttcattttgaagatggctatgtagcttgtaaggtgtatcacagcagtacctctcatggctttttggttccagcagtgagggcattggtgagatcaatggtaaactgtgcaagctttctttttatcattaggaaatgtgaaacgttggacaaattttgagttttaacaaggacaaaaagttgaaagaaaaggcacagttaacaaaaaagggtggctagatttatcttgggtgatggaggaaatgagagaggaatgctcttgaaaggtggtctgtggatctgtctgaatagaaagagcacagtaagtatgcattgccggagaaaacgtccttgaagctgcttgtctcatgtgtatgatgtgctttttaaatcatgcccctcgttgcctgcctaatctgtgactccctaaaaactaactgggcccatgtagatggggctgcaaccagagctgaataacatgttaggctcacacatgcatcagcactgcacactggaatcattgctcttcctggactttgtagaaatcagtctcaagtgcttcaagagtctggctcctgctacttttatctgtcaggtagcacataaggtttgcagggtttatattttgtatagaatcacagttgtggagaaaaagtaataatttctcaatgaattttaaaaatgggcctattttctatccccgtggttcatctgatataattagtgttccctgtgaattccccccctctatgggaaggatgcctttactctttatcagtaataaattatgactgttttcatattgccttagggttatttccctgtgtaaaccattgtcttttgttttggttttctttagcattatgaagctttggtattgtacaaggtcagtagtaagatgctcactagtctcagggcttgtgtaatattctgggaggtcatttaaatgccagaaatggtcaagcaattatacacagtatttatgactctgttaagcataccgtttgtctgtcacattagtagattctgagattaaaaaaaatttttaaagagtgatcatttaaataatttctaaaagggtcttttcaagctctaacaaagtcactaacaaatgcattattttctacagaattagatgttagtagtacagtactgcatattcagggaaaaagtgtgaggaattgatttcaaaatagttcgttcttgtgtttgacctaagaatgattgtcgcatgaagtgtttgtttttacagtttagcatatataaacaaacatgataggattccttaagatgttaccacccagggggccacaagccagcctgctgtctcaggaagctgtagaaggagtgtttgtcaatttcttgtcactggtttgctgacttactgaggattaattgttgccttacaatgttactgaaataaactgtttaatata

SEQ ID NO: 16401 - DNA, 676 bp, Homo sapiens
atttagactaaaagagccagtttttaaataatggggcattgttttgactcccataaaaattttcaatgtttattatactgttgaaagcatactatacattgtgtgtgtgtgtgtgtgtgtgtgtgtgtgtgtgtgtgtgttttaatgtatcttttcattagcttgcaacaaggctttgttttcttggggagggaaagatctgttccatttcacttactgttctgaggagggtttcaaggttctgtgtttaaagtcaggatttacctgtctgtagaacataaagtgaacaaagtttgaatagtttagagtaagctagccttttgcacatttacattgacatgtttcttcttgaatttggactgttgcagcatatctatgatatggtattcagtgtcattagtgaaatcttatttttgtttctgtaaaaaaaaaaatacatatatatatttatgcattgtgaaaaatgcagtccatgatgtaaaattgtacatattccagaatccctaacaacctgtactaaatatatgtacaaagaactatgctgtcttatttatgttttgtttacataatgtatagttttttaagtattttagtaattttggaccagtgaactgttagcaacaatgcagaagaatctgcatgtaataaactgagttgctgtatttctttgtttgaa

SEQ ID NO: 16402 - DNA, 1270 bp, Homo sapiens
agcactttaatataacttgaatattatctattataaaagtaactacaaataagtgttgtgaatagattttattataaatcagagaactgttttctccctgctaagcagtttatagttcttctccatgtttctccagaattaatcagtgttagtcctctgtttatctcgcatgttttatcttccaaacacagaccttggtgataacctgtgcttcaaactgtcttaaacaatgtttgtcacctttcccctagttgatgtaaagtatataaattgttgctatttgtttgaactattattgatgctagccaagcagtatacttgatgtgaagatgtcatgctatcacaatatgctaagagctcacaaaaataagatagaatttccaggacaaacatctttggaattgtgagtgaaggatatagtggcaggcttgtccctctttaattaatactcttggtatttgtggtgatgggaggatgctgttactaggagagttttgagatactgcagtggatgtgggatgtatatgaacttcttcataatgtactcctgggaactgggtaggacatatccatattgtagttcccaaggtgtctggttgagagttagagaacttttaaatttctttagccagacaggtctctatttttttaagttatccaggactccaagaaccatagttactgaaaagggagtcctgatacatctaatattggtagcatgtaacagtgtttgacaaagagtaagtaagcagtattcttgggagtcagtgttatgtgtttcagcagagtattattttgtatatgtatgccattttctccctgcaaagcagctcaacaagagaaaaagctctagttatagggcttaaattgatttctatttcaaataatttcctaagagattctagagtagaactgaagagtattctattggaaaagtgaaaggaaagaaatgtaattttctttgaacatgaaaaagaaaacaactttgagagtagtcatttagcagtagatgtgcattattatgagaaaacagttctataagtccagggttaattatattaattggaatgtcagtctttaatgtcgagcttattgtagggtagaaaagagctttctactcagctaacgattactcattgatccaaaacttaaatacatctataatttcctggggctattgtgagtactgtgtatgtatttagcaaatatttaagacctagtaagtgctcaataaattgtagctgttattgctgttgttgtttgtacctct

SEQ ID NO: 16403 - DNA, 551 bp, Homo sapiens
tcctctgtccctaagtttaaaggactgatttgatgcctctccccagagcatttgataagcaagaaagatttcatctcccaccccagcctcaagtaggagttttatatactgtgtatatctctgtaatctctgtcaaggtaaatgtaaatacagtagctggagggagtcgaagctgatggttggaagacggatttgctttggtattctgcttccacatgtgccagttgcctggattgggagccattttgtgttttgcgtagaaagttttaggaactttaacttttaatgtggcaagtttgcagatgtcatagaggctatcctggagacttaatagacatttttttgttccaaaagagtccatgtggactgtgccatctgtgggaaatcccagggcaaatgtttacattttgtataccctgaagaactctttttcctctaatatgcctaatctgtaatcacatttctgagtgttctcctctttttctgtgtgaggtttttttttttttaatctgcatttattagtattctaataaaagcatcttgatcggaag

SEQ ID NO: 16404 - DNA, 2080 bp, Homo sapiens
aagtaccaccagtgaatctgtcttctgtctctgtccctttccccgtgacacacacagcaggcatggaatttaatgggtgttctggacagacacttgtacatggacagacatcactactgtggatactacaagactgagaagaaaatcgtatgttgtcattctctggctatggagtgtttgtggccttcacagatttcacaggaaccaataaatccctcagagaagtaaacaggttctttgtcttatctggggaaggaaagtataacttatatttaaatataattgcttaattaagcattatatataaacataatagtatgtcttatataattgcatgtcatattatatataataaacataaatatgtttagttatatagttagtataatttttaaaacttttaaatacagcatatggtaaaccaacgggaaaattagctattttacttcattattttaaagagttctttttatttctttcataattggatcaacaactgttaacctaaccctgggtgggcatcatgcaatatatagaagtacgtgaaattttctgtgtatgaattgctgatactttgcaaggcattttcaaatccatcaccttatgagagcttcacagctagtctgaggtagttacttcattggaggtaaaacttaaaacacaagaaagagcccacatgatttgcctagggtcattcagtaagtccgtgatggagctagaacttgttcttgtcagttttttgttctagtcttccctttcatggaggcaagaataaccattatgaaacagttagataatcataaaaatcagcatacaataaaagacttaaatgtcacaagaaaaattcaaaacctttagctaaaaaaaaaaaagatcttttgattctttttccacaagcactagatatgtttctgtgatgattttgagataagtactcaaaattacatagttcatttctaagagaaggccatgttttctacctattgggtttttctaccctgagatactatggcttctttgtaaaggtatataaagtgtttttcaaagcggaaagatactgttaaattcagctgctaatcatagtgtatttgtttggaatgacatgttgagcaggtagtacctttacggctgttgctttttgcagcattatgtggaagtgcctaagtctatttagcctcacagatgactttagaatcttgtattttctacatcagagttcatagcggggatggtgctacatatatctatgcaactgaaaaagaaaacatttcaaacctaaagtacgcaacaagatattatttatatgaaatccatagctcagttatgctatgttcatgaatagagaagttttaagttggaagggaccatggatgacccaaagcagatacatatggtcattcatatacctaaaatacctacaaagacaagttgttccctggtttaaaaggcagtctgttctattgatggactgctttagtccctgaacattttctttggttaaaccaaaaacacataaacctaacttggtcttggcttgatctactgggtaaataataactcttaaatatatatacagttgacccttggacaacacaggagttaagagcgctgaacatttgctcagtggagaatctgcatataacctgactcctcaaaaacttaattagtagttagtttacaattgactggaagccttattgataacataaagcagttgattaacacattttttgtgttgtatgtattatattccgtattcttacaagaaggtaagctagagaaaaaaaaaatgttattaaggaagtaatatattcactattcgttaggtagaagtgaatcatcctaaaggtcttcatcctcatcttcacgctgagtagtctgaggagcaagaggagttggtctttctgtcccagtggcagaggtggaagaaaatccacagatacgtggacctgcgcagttcaaacctgtgttgtttgggtcaactgtattgtaatagcattttaatgtttttctcagacttttacgagtatgaatctgagctttttctgaataaacctgcctgctcaccattaataatgcc

SEQ ID NO: 16405 - DNA, 3627 bp, Homo sapiens
aaacccctgacccattctggatttttactacaggcccttcaatatccatggagtctcttctgagccatacagggcacttgagaagtccttcttaacttctagctaacaactacttagtgggactattacacacaaaacaaattaaaaacaaattattccaggtggaccaagaattcacagtttaataatctaacctgaaaaataatgaagagaatcctgactgatgaggcatctgaaggattttatttacagatacctcaaggattcaaaatcaagggaagaagaaatcacagcaaagaaccaccatcttattcaggattgcttgaaaggtgcaaggagaaattgccagaatgctgcagttcagcacaagatatgtgctggtgtggcttctcacaatgaaacggactctgctttgacatcgccccttcccaccatactgctcataataacattttagggggaaaggggagggaatgtttaaaaagaaagtccttgatttagttttttagtattgtaaagatactgctgacctgtgcttcatttctaactgtgtaaacttttttttaacaaaatgtatcattcgataaagtgaattttaaaaaagttacataactcttcatttttttatttccaaatcgtaggtttttttaagctgtagaactgttatctgtaatatcttgctgtagaaatatcaaatcatttgaaaatttgcacatttttgtgcaaaactcaatctacagtatcagtctcgtcagatatattaattttacacttcagttttgattggtgagaaagtacccattctcttcaaataatcaaagataattattattttgttttgtttttggaatcaacagggaggcgcaaagtataaagttgctgctaacatatatacatatatatccatattttataagggtgtctatgtatatatagacagtgtgtccacacaaaaaatagatacagttatcagtcagtcagttcttccatgatttagtttttttaaacgtagaaaagctattgtaaacatctctttccatttattcttaattttttgacatattggtatttctttaaagggaaatgaggaatgcacatcagtgattgattgtcaaacctcaccccctgatttcctacctaatctacccccacctaaccaatcaatcacatccacaaattgttttgtttgtttgttagtcaggcttccaacaaagttcaatatttctaacactctagtgcaataaaaattattattaaatagctaagaggtgtgcatgtgggaaaggtcagtgcatatccctttaggaggggagaatgttgtaatatatcagctatcgagttgtttaaaaaaagtgtattcaatcgtatattgtctatagtatgtgctatgaaatttgcatttatgatatgtaacaggggcaaagccaaattcatgttactctgttcagtcagaaacattttgtggcatacagcattcctgggaagtgctgtactttgtttcgttttggttttagttttgcatttagagtgccttataattgatgcctattttaatagcatttctttttagcttttggttcgtatttccattcactgttcgtatctgttactttctattaaagcattatctgtttaccacatgtacaaaaactctttgaataatatgcattcctagttttcagccaagtcggggatgttagtgattgtaccagcccaaagcacttggataatcagggcccttcttccttttataatcaatcatcaacatcagaaaaagctacttgttttatttatattcccttccaaatccgctctggaacatgcagtaactgcaccaaacttattttagtaacaaatatcattggcaactttggaatatatttgatattccattaggatttttctaaaaggggaaataaactatatatatatatgtatcttacccccaattcttccaacagaatttctataggaagccatggatgatggcataagtttgccacatattacatgattttaaataatcctcaaaatacccaaggaactcttaaagagttttggtatgagtatactactttggtttaattttagcttcatggatgttctgcatggaaggatttttgttttccacattttcccattgctagcagagtgaaatccaagagaccaaacatttgcaagcattgtatttgagcacttttgtaaaaaacaaagaaaaagaaaaaaaagaaaatatatataatactaaaaaaaagtatctagaaggctacctcagaatgagactctctaacctacatcagaaccagagaagaatgtgcactatgtgggtctgttatcattattttcttttagtttgtatctttttggagatttatccaagtgccagattactcagtgctataattttcttttagttaaacaaagggggtcagacagacattgcatcatccagacatgccttgttggacatgtagaatccgatggagcactgcacaccagaatgattggccaatgagcagcttctctccctgaaacaataactgcccatttggcaaagggaaagatgacaataatcagaagaagaaaatgaatgggatgcataccatagacgaacgaggcggagactattgcgggaatcttactgttcaggagctgttcctagaactaactcccttactgtcattgatgtgcattccactctgtgcttttctgtacaaccattcaagttttaatttcccaggtgaaccatctttatctgccattaccacaagctttcaagtttccagttattttcatcatcataaccagtacggtgctattatttacctatgtacgtgtagttatgtataattttgtaattagttacaatggtaaaaaaaatcaaaatatataaaaagtgatttgtacagaactttattttagctcttttttaaaaatgatttgcatggttagaaaacggcgaggacagccaggggagggaagggcctctagggaactttgcactttctatacctttgtactatgcactgccctattgattctacacccaataatgatattacttgaacccatctgtaagaaactgcttcggaaattcatttgtgtgtatgtaaataacacaacatagaaacaggaagggaaaaaagtctgcagtaatgcacgtattttttttctttcctgtttattttcggttttgctttaagtccttttatttttaattccctttttgtttttctttttgggttttggttccttttgggtttatgggtgccctgatactccagcagagatcagaaggctacagatccattctatccatccgttatgtggctttgccatcccagcttggagtgtctttacaaagataataacagttgtgttctttgctctcgttttggatgcatagactgaaaaattaaaacaaataacttgtaaaatggcttgttaaaaaatacaattacctctaattagtagtacgcgtaaatgttttacagaatgaaaggcgtgctttttattttcttacttcgttacattggtggcgaaagaagtctgtatgaaaatcagttctttgctgacacaagttccatttgttacaaatgaattctaataaaaatgtcagtgttatgc

SEQ ID NO: 16406 - DNA, 1261 bp, Homo sapiens
attggctgccagaattgaaccaacccaacccctagctcacctcctactgtaaagagaatgcactggtcctgacaatttttatgctgtgttcagccgggtcttcaaaactgtaggggggaaataacacttaagtttctttttctcatctagaaatgctttccttactgacaacctaacatcatttttcttttcttcttgcattttgtgaacttaaagagaaggaatatttgtgtaggtgaatctcgtttttatttgtggagatatctaatgttttgtagtcacatgggcaagaattattacatgctaagctggttagtataaagaaagataattctaaagctaaccaaagaaaatggcttcagtaaattaggatgaaaaatgaaaatataaaataaagaagaaaatctcggggagtttaaaaaaaatgcctcaatttggcaatctacctcctctccccaccccaaactaaaaaaagaaaaaaaggttttctaatgaaaatctttaaaaatactgtcagtattttaaaattttcaacagtattataaaaacattgcatctccccacctctaatatgcatatatatttttcctgctaaaattggtttctacaattgagtaaatggcaaatacatgaagcaatgtccctaaattttataaagaaattatatttaatgcacatttcaattttcattcttatttttgaccttttgtaaaatattttcatgttgctataagtaaatgatgatgccaccccatgttgactatggtttttctagaaagcaactatgctgctaaccatagaggaacatagaagggttccagaatctttagtgctggttttaacaaccgatgcaacattaaaaatgtgttagtgtgctgtgcaattggttttcaattcatattaatcttaatgacagagaacaatgtgttactaattattttggttgtatgccattagtaaattgatagaaaaattaaggggattaacataacttcatttcattgacttatattaacatcttataatacaatagtttaagactaagggaaacagatggagctgtttattgagacaactggtgaggaattatcatgtgttcattcccattttagagcgtgaaactcctacattagaatatataaagtcactttaaatatctatatttgtaacagaagtagtgtacagatattttattacagcatttttgtgtaaatgcagaattaaagtgaataaataagaattttcagtggtgcacaaataa

SEQ ID NO: 16407 - DNA, 6460 bp, Homo sapiens
cttggttcctttccaagtgtcaaataggacacccatcttaccggccaatgtccaaaattacggtttgaacataattggagaacctttccttcaagcagaaacaagcaactgagggaaaaagaaacacaacaatagtttaagaaattttttttttaaataaaaaaaaaggaaaagaggaagactggacaaaacaacacaaaggcagaaaggaaagaaactgaagaaagaagataatagaccagcaattgcagcacttacaatcactaattcccttaaggttgaaactgtaatgacataaaaagggtcgatgatatttcactgatggtagatcgcagcccctgcaacgtagcctttgttacatgaagtccgctgggaaatagatgttctgtctctatgacaatatattttaactgactttctagatgccttaatatttgcatgataagctagttttattggtttagtattcttgttgtttacgcatggaatcactattcctggttatctcaccaacgaaggctaggaggcggcgtcagaggtgctgggtgacagagccatgagccagccattttataagcactctgatttctaaaagttaaaaaaaatatatgaaatctctgtagcctttagttatcagtacagatttattaaatttcggcccttaacccagccttttccagtgtgtaacccagtttgaaatcttaaaaaaagaaaaaatgaaaaaaaaaggaaaaaaagaaaaaaggaaaaaaacagtttgaacacaaaggctctatggaagaaatgcctctatgtaggtgaagtgttctctctgcatgcaacagtaaaaattaatataatattttccccacaaaagaaacacttaacagaggcaagtgcaatttataaatttatatctaaaggggaatcatgattataagtccttcagcccttggactctaaattgaggggattaaaaagaatttaaaataattttgaacgaatttattttcccctcagtttttgagggcattaaaaaggcattaaatcaagacaaatcatgtgcttgagaaaaataaaattaatgaaaacacagcacttatgttggtttagctgcagcctccttggaggtagaatttatttatttaaaattactggttgcatcaagaacccatagggtgtacaaaaggttctataaaatctgcattatagagacaaagaggcaggcaaatccatgtcacaagggtaaagcttacagtttacaaactgggaacgccagggtgtaggatataaaaacgcactcttgagaaaacaaatgtaatcagggtgctgaaaacttgcatggtgctttcagacattagccttgttcaacaaatttcttgtattgacagatccatagtgtgcatgggcagacacattttgcctctatgtctcttaaaattttaattaaaaatactctttccagtaatcctaatttgcacgaagatataatgtccacattacgtgccttgccttgaaatctaaaaaacaaaaaacaaaaaaaaaaaaacaaaaaaatacaacaaagtgacatcactacacttgttttgctgcatttattatcattttaaatctttaccatttttatgacaaaatattttgtactccagacgaagaaaaatgtgtgacatcatggattttttagacagttatacctttatctcacatttataaagcatatcatggctgtgtatagttgccgcttaaaaattgtaatcgaccagcaatattttcagtattttggtgtttttttctattaacctttcatgtttttcatcttccaattaatatttgggggggaggggtttcaaatttatacgaattatgcaataccaagttttgcctatgtaggtagtgcttttagctgtattggttattataggtaagtacacagatttaaaaaaaaaataatgtatgcttttttgtttgtttgtttgttttaattgaccaaagtgggtactgctatttttgcagtgtgatgaggtccttttgtgtactgagagatggacaggggattttttttaatatacatatatatatattctggggtgggtgggaggatttttaacactttgcagtgtagctgtgaagcagtgcaccctgagatgggcctgggctgcaaagcgactgttctgcctactgtgacaaacttcaacttacacaggttcccctctctaacttcccacctgggttgcaagctgaactcattactggttttcataacaacacaatagtaagaacaagcaaacacaacaaattctcctggaggcagacttggcttaaaaaggcagacttggcttggtgatagtttttcttgaaagttccagatccacagtggagagtgagcctgtctcatatttggcaaaaatatttgttgaaatgtccacataggggatgttggatgtttaacacttttgagagtttaacacatgaatattctttctcctagaaaacacattagacctgttggagggagtctcccgtattccttttctgccacttttcgtccccatttcatttcattaatgataggatatgatttacctgtgacttactacttcaaatggatggcagtgcacttggatttttttttaatatccagaagattgaacagagggttgctattgttgaatgtatttggactgatagattaaaatcaaagttcaatttttaaggaacaaaaaagtaaatcctgttttcattttatctccccttttaaaactgagaaccagagcagaagggaaatatagaattttaagcaattaatcttcctgtggatgaattaaacccattagatgctgatgggatttttttaaggaatggtaccttaactatatatttgatttcgtttcccctgagggctagaggctgaatggaggctggttttattttgcctttccctcaccgcccagtcccattgagtgtattcattactagaaggaaaatctttcagaattggtgacacatggtaggctgtcttaaggagtcccctggcccccttcccctaggccatggcctaataaaataaactgtcaattgttctcacagcatatcatttaataatgaatactttagaacaatgcttatgggctggagaattgtatttgattagcccattcagtttgatagcccaaatgctgaacagcacagcgggatcctagcagtgcaagttcaaaagtaagtccaatcatttctgtgatactcgccctggtagcaaacagatcatctcagccaagctcttcatgtatctttgacctattaggtgaacaaatgaacctcacaggacacacagtattttttaaaggcagactcgctctcttttttgccagtgagcagttctagctaaccaagttacacactgtgggtattcctgcctgcctcttgaatacaaaggcctagttcaagtgttgctttttttatttcaaatcaattttttcttctttcctttttgagataaaactattaaaagtactactatatatataaaatctcaaatcaacttttcggcctcctcctcgtgtaccaggaagtatattctgacgaagggccccacttttgcaggtcttgcacgcccctcccttacccagaactgcagagcttcaggatggcgaaggtcacccaagggcatgagtagggagtggtgtctccaaccatcagttccgtggcactgttcagcctttgtgtgctgccctgccacccaccactcacagtgcctctgaagcgtgttacccctggagtgacgtgagcatttgaggcttgtctaaggaaaaaaataaaaggcagtgaaggagactgtacataaagacatggcaaaaatcttaattatagcaatatagttatcgggtaatgttcgggtgggcagctccattaaaaaatatgtgaatgaatctgtgaagctgcaagtagcgagaagagcgaaaggtcttcttaatgaaccgcctaccttgtagacagtaatttgtacactgtatagttttgttaagaattttttttaaattaaaattcccatgtttgtaaagctaactttttaacaattataatggaactatatgttgtttccatttttaaagtaaacaagaatattccttgtttagagactggacttgagttaaaactctccagtctcttaagttatgtattaaaaagaaaatctgtccatgttaggagttatttcacagattcctgtgcttgaaaagcataggatactaatcctttaaaaaagtgtaaatggagaaaagttatattttatgaaggttattttgttgtatttagtattggaaaagttggtttccagagcatttcagaatgtcgaagcaccactgtctttttattagtatatacggcctttagcaaaagtttttgtgattgttacgtgatggtatttaaggttaagtttcacagagcattcaggataggcagaaaactaaaacagtgctatgtctcacataacgtgtcctcagggagcagaatcttggatttgtgacttgtagcttcataaggactcaacgaaagagattgcacagggacatcttcagcggtgtgacagcaggacatgttctttacctagattcaaattctatgtactgtgtgaaatgatgaaggctgcagaaagttatcccatattcagtgtacagtattcatttttaatgaaacaactctacaatattgctggcagataggccccaagcatgacattcaatatagtttacatgttcctgtcaaggtcttttgttaacattaaccagctgcatgctttctggactttaagaaattgggtttctatagaaaactttttttttttttttttttttaatgtgcaggctattcaagttcaatagtaaaagctcaaaaatgaatgttctactccatgctgaaggagctgaaagctgccttcttcatattttgcactttctggtagttcccctgttttttctaattccctaaaattgtgtgggtggagtggagccctgcagttggggggtaacatggaccactgattttgccctttgaccctgcacaatgacctttgcatcagccaaactcattgccatgacaactctttgtactgtgtccgtgccacagatctgttggtcacattgttaatagtaaaggggacaagttggagacggtcaatttttacattttttgttgcaattttttcttcaatggttgtaagtagtttttttttttttttaataataaaagggttcactagttaatactctagaaatatctgtgtgttgcaattcaaatgtatgttgagattgtgaaaagcgcttcagtgccactagcttaccggtacactagactaagcccttgatgacttattgcatgatacagtaccaggaacaacaggtggcctaaatacatgaaaagcagtgtaagctagtgacactaaagccagtcttgtattactgtatttttgacagaatggttttgaaaactgtgctacagggactgatgtggcaaatatatctctttatgcagaaggaagtctttttttttcttttttttttttttaagaagtatggctttttatgcatccttcatcgagggcattgaagttgcatggactgataaaagttgatgcaaaacaagaaagaaacaaacaaaaaaaaaaaaccagcaaaatgtttaccaaaaaactcaaacaaatgagcagtgcctgttcaatttcacagtctctgttgagttcagttgtaaatatgtttcaaatgacattttcttgggaaaaaaaatctctacaacattgtagaatgtgaggggtaactacatcccaggcataggtttctcaaagctgcagtagattatgtcttcatcaagctgttaatttgtgcttatatcatatagaacttttagcatcctgggaagagctgcccccacctcaatgatatttctctgagaacaacttttgtaggactgtgtgtttctttagatacatttagtacaactgtaggtgacgagtagtcagttattgcttgctagctacacaccagggttgatccattttaaaacttttggcattttgtcctcatgggccataaatacagaaccttgtattttaattaaatttttttacaaaaggaggcacatgcacaatctccatgtaacaaacctttagcagtaggatgtattatacgacagttacttaatttctagagttcaggcctctgggatcaaccccagactgggccagaatgttagtgaaggttttattgtgcccggttggaggataacgttctttgggtactttttgtgggttgcaaatgaactcaattgccacaagttttaaactggtgtaaatcaagcttgacttaatgtgattgttactgttatatccagcctatactgctagcagctgctcatactgcagtcaattactggaagcggatatatttcctatgcaaaaactgtttaaacaataaaatgagctatgctacag

SEQ ID NO: 16408 - DNA, 1931 bp, Homo sapiens
acagatggatggtgggcacagatgggtcctccatgctggcaatgcgttacaggttttatgataatagaactatgacagtcttcaagtcaattaaaatccacccaccagtcttaggcatcataatgtgccccaggctttattttaatagtgatcttgatcctgttgtgggactaatacaagatctatatttaagttttaaagcatgtttactttcaaattagctttccacagggatttcttgaaatgcttttgttattaaactcaaaaggcagtgattaggatgaaataattgtacataatttattttagtactgacagtgttacagattctaatttatggtaaatttcagatgtttatttaaaattttcacttttaaacagtaaccaaatctaaatttaattattcaggttttacaaaagttgatacaccttcttatagtataggtaaattttctttttcaaatccaatttaaaataacctttccttttaaatgtgctgcaacgtttttaaaaatgcagcagcataggagtgaacaacagcaacacaaaacgggcattggtttcttaggagtggcttgcttacgttttcttcttttttcttcaccaaaaccaacatgaaagtaccactgaagtaaaacaccaactacctaccttactataaaggaaatgttaaaatttttttcacaataattttttcaattttcactattactgttgtaattattgattgtgattaaaatatttgctcccaggagaactcctgaccagtgggcatgtattcctattttatcctaagattttaatgagcaaaaaggggagagaatttgcaataacttcacaattaccttttctagtgcagttatattagaatgcatatgtttttaaaatgctagtataactagatagtatataatgtacagtataaagaggaatattgtgcttttgaaaagagtatactttttacttttatttatgtactagtagatgtaaaatttcacattgaaggtttatatatattggccaactcatatagaaattttatttataggaagctactactaaaaaaagtcactaactttgtgtacctataatccctaaattaaaattaaattttaattggctggctgtaatttgcattgagagaccttttactagtagctagtgttaggaagtgaacctaaaataagaaaatataatgatctgtgtttatcattagccttgtacaaatgtaaattactaatagtgatgttcttttgcaaggcatagaacatttgtatgaaaagacatttagtatgctttgaaaaaaactcagcttttagtttttttccattagaatactgcaaaacccatatatctttttaaaaaatttatgtactcacagtctttcccttgaagagaagattgaaaaagtctactgttcataaaccatgctaacattttccttttagctagttttgaaagtaaggaacaatacctgggaaataattaaacagaaggttaccattgtcagccagttggctatactgtggttagttctttcagaaattgtaaatatcttgtagcatattctgaaataatagagtaagttcttctcagagatgttaatatcatgtttttcatgttctaattagaatactttattacttacaaactcagaaatacgaacagaaatacagcagacgaacatatttattggtactgaaaagagacgtagtaaattaaatagaagaaatatatttataaagcttagtgaaacacaaaattagaatgttcatgtcaggcacaagggtttggattttgtgcaagctaatttggccacatttggcctggtgacagaactgttcataaggaagtaatatatagataaggtaggtagatatcagttgaatgccttatattgtatacattcctttcaaataaagaccttgaga

SEQ ID NO: 16409 - DNA, 354 bp, Homo sapiens
agagctatcccactattacctttgaaaagcaaaaccacaacagcaaagatgctgattattcagtctgaaaatgttaagtgggtacataacattttcagggaaaggtgacttgaaacgtagttttaaattagaacgatagaggaaatgatattagtctagttattggtacacgtttgagaccttgtctcagctctgccactaactagccgtagaatgttaagttgtaaaacctttctccatctaaagattttcatctataaatgacggacccgacctagatgattgctaaaatcctttccactactaatattccgtgatgcattttctccaagtttgggtaaaagccctccatct

SEQ ID NO: 16410 - DNA, 243 bp, Homo sapiens
atataacagaccctacagggggccacctggagtttgtcacctatttattcacaggatctgtgaatattgctccatagaaaacaaattgttatgattgagtgggtatacctttgtgattctgtctagtgaaaatgggacatttttaatagtgccagaaagattgataaataaatattttttacaagataagatacaatttttgtatctcaataccttttaaaataaatgccagcagtattataa

SEQ ID NO: 16411 - DNA, 456 bp, Homo sapiens
tcagaacttgaaggatggaatttttcctcaattagcatcggcatctgctatagattcaaccttatattaaagtggaaaaatgatcttgtgaataagagacaaaaaaacagtttttttggtcaatattttctatcatctgagagatttactgttggtctacataattttttttcctatggaatggcattctatattatctagaaaattcttatattttgcctcccccaaaagaatttcatattatttgaattagggggcgaagaagtcttttgaaagacttgcagatgcaatagtctaattagattatttatttttttaatgtgaaaattaatattgtttagcaaatagcttacaagttgagccaattttggatttgttgggtagttaaacttcagagatattttgttgcctgtatttaaatttcagaagataaataaatatcattgcatttaaaat

SEQ ID NO: 16412 - DNA, 1452 bp, Homo sapiens
gttgacatacctggaatatagagaacacttgagaagtttgtaatggttttcatttgaaatagactgctgaaagttttaaatttttataagcataggtttgatgttgaaaacttgttttgagggagaaaatccctttgttttaaagtaaagtaaacattatcgctaagtgtacttgtgcagtattaacagctacattatacagtaaatgtgggataaaatccatttagaaaatgttaaactgcttttccagacatggttgtagcatattttcaattagtgtgtgtatgttaatgtgtaattgatagtagaacaaagttacatttttaaaactgctacttgtataaaccttgcctcttttcccaaatactgtgggttttgtgcatagtttttacaaaccttggatttaccagactgtcttttcactgtttgtgggttttgtagaagttacacatttttatggtagataaaatgttacttctatacaagtactcactccctttttatcaaaagttaattttaatctcacagtctacattgtgctacattatccagcttctttggaacaatgtgtgctctgtatggttttttttggtatgacaactaattaagcaactgacatggaactgagaattctacaaactataaaacattaatttttgaaggtaatttagttttgtggctgggcattcagtgaagtcttaggacttctttgcagacaactgactgggtatatataggaatgaatctggctttagggttaaatcatttaaggtccttttataggcaggcactagtaactaaaactgaaaactaagtaagtttatttttgaggaatgttgttaaaaatgtctttaggaagtcactaaaacttaattggaagaaaaaatcatgatgcttatacaataaatatgaataaatgttatataaggaaactcacctatttgaaatcatggctatattgtttttattttctagattccaaaaatacaaacactagttgttccagcattgtactttgataagtctgtacattgacgtgtatggactaaatccagggtaaaatcaatgttacaaaatttaagggtatgttaactaaaggatagcatttctaagatattttgaatattagggtcatttggcacttctcagcaagtaggatacttctcatgttttgaaattatatgaatatggaaaaaaatggcttaagaccagcgtctctgtatgacattgtgtggttgaccctctgagataactgttttcatctacagaattgcatttttgcttttaaagaggtcttataatggaactaggaatcaccgttttgagagaacctgcatatataccagtcattatctgtttggtccttatacagttttaacttacttagatttattctagttaagccataagttcaacgtgtaaacttgttttcattaaagaatttttctatca

SEQ ID NO: 16413 - DNA, 561 bp, Homo sapiens
taaaaaatatatctcattttgggctcaaagcattaatccagttactgaaaagagaatacaagtggagcaaacaagagatgaagatcttgatacagactcattggactgaatttcccccttccccccattgatggaagaatgttccagattctaaattgaggacttcattattaatggcattactgtgttatgattaacaaatttcctgtaaggtacacactacatactaaggtcggccatcattcctgttttttttttttttttttttttttaaccaagcttaaaatgaagctttgtgtttgaaagtaataacaagctcagacgaagatggtggttgtacattattcatctagaaaatataaaaattcattttgttttgaagctagttattaaactggaatagcagttatatccctgagaatggggcccttctcttgacattcctttgttgtttaattctttagaatcttaataaatgtttttttaatcctgagagattaaacagtagtagacttgttaagaatgaaactgtaaccaaaattttaaaataaagtttttttt

SEQ ID NO: 16414 - DNA, 9485 bp, Homo sapiens
tctcagaatggacactacaaatgccagctctcaccagatggcctacgtgtttgaactgccatagtcagtgtgcgcttatgtacttggggtgtgtgtgtgtgtgtgtgtgtgtgtgcatttatgtatgctctgtggctacatatacacacacgtatttccttgagataaacaagataaacactaggtgcttttgaatttttttcacttccctttatagttttgggaaaggagtgggatctttgatttcagggtgaaaacagagtacccctttaaacacacacacacacacatgcacatacacacacacacacacacacacacacagtgtgcaactagccccagttttgacagaataattcttggtcttccccaaagagacaatttgttgtacccatgactgttgcctgcaaaaataaaagggaaaaaaaagaaaaaagaaacaaaaaggaacttcttatagttgtcttttgtgaactttaaggttttgaaagaatcttcaattaaagcatggcagattcacctgtaaatatttagccttgaggggccattgatgtaaaacaattgtattgatggttgtttaacttttttgtttaatttttacagttacatccagctgttagatatgcaggaaaagatagtttgctggctagctctattcatttatgttagcattaatgcacatttttaaaaaaagaaaaaaacatggtcttgtttttactacctgttagatatagtgctaaagaggtgctggcatgctttacagcacagatctgattttttaaaatgtcctgtactagtacataaatcccgtcatgcactttttttcatacactacaaggggatgtgtaataaccatgcttcttttttatccttaaactattgccatacttcagtaagtgtcttttttaaaaaaaattcacttgtataaaaatggtctggtcagtatagggcacaaatgccaaacaaagtattagtgttaacacaaaactgccaactttgcacaagtttccagaaaagaaaatacaattagtcactcaacataaccacaggccaatttgttggccaccagaaaaccgctttttaaaaaaacacttggtgattctttcaagtgccgaatgttattagaatcaacattgcatccttcttgcttatacgttaagttacataaaaggaaaacaaaattatgtggtgtgaaacagccaaggcatttattcttcagaggcaggataatatttcaggatacaaaagcccaaattacccgctacggaacaaagatgaatacagtaaaagagtcgaacactcatttccaaggccctaacccttatcctttaaaaagaaatcctctgaactgggtcggtctgttgtatggctgtctaatttgttgcaaattctgcagtcgtactataattcaggcctgtttggtagacaaaatcaaaaggcatttaacagcagcagtacttggaagctttgaaaacatgtgctaaacttgaatggagcaacactcctttctgaaaagccagaagaagggggttttaaagcaggatctctcaatgttcagtgttttgtgtttccccacacgatttgtcagagagaaatgaaagcaagcctgaaaccaagcaattgagagtgagaaagaggagagagactattctccaaaccttttttgttttgttttgtttccgatgtttacacatgttgcctgagctggttaaccacatcggcagcctcagctaccacaacatactgactaaatgatgatatttactcaagttcagtctgcagccaaaaccattagggtgtgcattgcagactgttttgttgtcttttttttttcttttttcctttttttttaagtggaggggaaaagaagagataaacaaggaatattttgtcaaacagtacacaataatttaaagagaatgtatttcttttttgcatttaatggcctcagacatttctttcatcagtctaaaagttagaaatatccctttattttaacttttatgtcgtttccatttttcatgtttttgtaattattttttctatgttcacatcagcattcacttccgttaaatttgccaaaggaaactgttaatatgtttctgttgttattattcctgtaggatttattgtacctcacagtatttattgtttcccaaaataagcatcattagttggggattcagtatttttgttgtgaaaatttcagaaacaatagattcttaaagataagctagctatgtctaggagctttatcttttcacctccttcagaggatgctatggggtccattttaattcttcatttgttctacggggaggaaagaccaaaagtatttgcagtacaaaagaaactatatcaaacactatgttaaatgacaagtgtttatggtaaaaagctgaggaattagtaataatcgtttttgttttcttgtactttgaattccccaaagtcttaattgctttattttggtgttgtgttaaattgaacagacagatgttttcctttgttttataccatataagactctgtacagtatgtttgtgaaagattgaactagaataatgaaagtttgtttgcaaacattttggtcctctcagcgttctctgtgttgtgctgttgccccattaccaaatggttagattcaaaaagggtgggaaaagatttttaatatcccaacaaaacattatagaaactctggcttttgcagtgtgcatagactacatgtagttttatgaaaataaatacacatttttatttcagcaactttgaaaagttacactcagttgagttactagaactcatcttgtacaacagcaatgtttagtctgtttaatttaatgtcaaataaaaggtcagatagccctcgtgagtgaattacatagctgtcggcagtcacatcagcaaatgcaccaggcttagaacaaatgtttgttacttgctgcaaaccaagctaatgtgtatagccagttagaaaaagtccagaagtaatgagattctagaagtagagtttcccttgcttggaaacatgaatgtgttcacctgtgttttgtcagagaagtggcaataagtcctggacagctgacactttttaagtatctcccctatttgctactacttttgtgcctcaagtgcccagtcgttacggtggccttctaaatgagtaaataacattttccaatataaagcctatttgcttaaaagggacaggggagtggatggatgtagtacatgcaatggaaaatcataaaatgtacaattcttctgtttccaaagtattgctcgttcttgagtgtgtgcctgagtgtcttgttttgacttaactagaattctagttaagatggtgatcccatggcttatttgcaaacaggaaggataaagagatcagcgttttagtcatggagctcatctttgcccattcctactcatttgctttttcataggagttttttgttgttaaacagtttctctcaagccacatgcattctatgctggctgaaaattaatagtgatgtagatgttcatccgacaagcttttccccatgtgattggttttagccagagtttatcacaggtacaaaattaggcggtatgactgtgcatgttctctagctgatgttgaaacttgtactgtcttgatcatttaaaactatgtttttgtaaatatcaggtttagtccgctttcgggaatatctgcatgctatggaaagagagaaaaaaaggatagataatgaggaatttggtttaaaagtgtgataaaaatccttggcattctttgttctgatattaattgtatttaaataagtcaacccaatgtaactcattccagatcttagtccagctgccctgttcagcctgatgccttttaaaggtttaaaggtgttaatgttttccttttcaacatggcaaacattttttaaaacctttttggcacaatggtgccactgtcctcatagtgttatttctttggtcatgaattttcaggcccttccagtaagaggagaaaggcacttaactggttaacagccccattattatacattgctctaaggaaaaaaaaaaaaaaaaaactttgaatatatcaagaatgggctattccagaggcttctcctcaggagaaactatgcactaggttcccaccaaatacaatgtgacctttttttcccctttctctgtacacaccccagatatgtgccaagcaaatgagaatgagggccgttgacaattaaagcataaagaagctagtcaccagattgagatggacatgctgctaactgctgacagcttgacctgagcagtcctaacttgtatctggtctgttagcattgggttagattgactaacagagtaaataaaattcacctgtcataagacacgctacatctgctatcatcaagaaacaaatcatccagaagaaactttttttcatcctgtggtcacacccttttcttaagagcttcttttttaaaattatgacaaacgaatttcattctttaaaatcacttatcttctcccaaacttgaagtatttaaattaggtggttttgcttttccctctcattgtttattttttggggatggatctaaatgagtaagatgagcaataaaagataccagaaagactggagggatcacagtgttttcatcagaactaagtagagggtcggttcctgccctggttttggggtagctagaaaaggaaatcatgaatgcactggaaatgttggctcgagagaaaagactggcatagctctgcctcgcagtgggtgagagcgtattgatcgtagggacctgcagagttcctatgaccaggtgagtcggctctgaggaaggggttaggaaagcaagtacagctgcatgaaatagctgaagttcctttggggtcaggaagagccgacaattgtggggttttggttgcttttgctttgtttttgagtgggaagtgttgctggaatcccctgagaaccgaaagatgccaggggtcagcaaggctatagaaaaggccagtggtaacacctcgttttcatcctaacagaggagtaggtgcgaatggcaccagcatggatcgttcctttcttgatcattactcatgcttgccactgtagcaacacaacaaagccatgattgtaattaatactaggctaaagaccttgatcaaaatgggagctcatttactgttctatgaggtatgtaagtaacttctcttcacattttccctcagagataaaccacacgtggtagtcttgtttgcgttagtactaaggtcatgtttgatctgtcccagacgagtcgcatatttcctgtagctggagtgttgctcaccataaatggtcattttcaaaaagtattgtgtaattccagctgtacaactgaccagtgagttatctgtcatcactgttgcccacatacccgtccttccttgtgtagtttcatcatcctcatccttcccacatcttgcgcaaaatgattttctgtgctcattcggcaataactatgttattcggcatactgtctttttggcatttgttgaaaaatccaaatgcttttaatccaaaagattaatccaaatcttttttaatccaaatgattttaatccaaatccaaataacaggaggttaaaaaaaaaaaaaaaactaagcatttttacatgtacactgaattggatcagcattattgttcattataatgctatatatatttttggagcaacatactatagttgtcataaaactatctttattcttctcctctaaagtgctgttgtaaattcatttgacctttactgcaggaaaaaaaaaaatcttttttatataggatatgaagaccaaggctcagtctgtaacaaatagtggaccattacaaaagaggaaagaaaaaagccagggctgagcagcaagaagcttcagttcaatttcacctcgtatctttctaataacatacttgtcactttattaccttccagtaatgtgaacgctgctgacaagactgtcacactaacagcagacaacaccctctctgcttcagcccagctctcctggctacttattgccctggccctgaagggacacaaactaatagtgtgctttccagttcagcacttggccatcaaatataaaaggatgcgtaattgcctgtttatccccttgtgaaggagaaattgactacaagggctaggctttcccatcgagttccctgatgtacacacacatccacaatcagtcagtctctctctctctctctctctctctctctctctctctctctctctcccctctctctctccttccctcttattctcccctcctaacatacaagcacatacacacacctactgtatctgtgggaagcccaaggctgcctctcgatgccctctccagctattaagtggacagtaacaagatgacttcttaaataaagggtcagtagagagatgctgtctgtgacggcatcctttgcttctttgaaaacttaagtgttaacaattccatcttgagagtaatgggtgtggccctataattagagcaaattttcctgcaagtcagtggcataagtaagattatattgccccctaatctgtagggaaaagattaaaatatttttcttccccttcaaaaagtgcacatgttgtaaactggttacgcacagtggtcatttttttttcttatccttggcatcaaaccatggacgtaggtgtacaaatgcatctttcaatgacccctccaaatccatagtgtaacatgatagattaacttttgtcaaactggactgacaatctaaaaaagatggcgtcaggcttttgactttaatcgttaaaacaaggaccaccctatgagtaaaaggtaaattctccactttgaagaactttggtaagtacaagtacagggagctttagaaaatcgagtgatggggaccaaaggtacaaaggaagaatacatgaaaatgttatattccaaaatgccctgagcccaaagattggctgctatttttgtatattgaaatactcaaatgatggttggaaagtgactagttagtgactaaatgaagtgcaagatctatcaagcgtcttctttctgggactaggggatgccatgcttccttccaaccttcccgcagcgcatctcagagaagatagttggccccattacaaacagtcacatttcagtaagatattagtcagccaggtaagacacgtgcaggtatcggtatcatcttccatatgaactttagcaaggagagaacagcagcagatttagggatagacaatgtaacaggtctatgttgacaaatctgtgctaaataatttcatgaaccagtgtggggactgggaagaaaagcactttgagcaaggactcttgggttcgagcaaaggcaattagttgacatgatacttcttaagttcctcagtatgtatatgttacaatcgtttatcagacatcttaatagaatcctaattgaaaaaccagttgccaaaattgcacaagttctgctcgctgatactagctttctccccttaactctaaaataccagggatgcttaaggacgtttgtaatagtttttttaatgctttgtttcacttttttaaaaaagaatctttgaagggaaggaagagcagaaagaagtattttaagaaaaatggagagaagtagatagtattgaaagtatatttcttgaagagagagtatctaagtgctataccaagattttatagggcttcctgttgccaaatgtgatgttgagataatgcacagctaagatggcaaatccatcaattattaactggctctgcccacttctgtcatggaatgcaaggattgagaggtgactctggggagaccctgggtgtgtgagagagctccattcatctggccctggatatgtttttcaaaagagagggagaaagcgccagtccctgcaaggtgaactgacctggcactgtttcagtgggagcctcactgcctgccttttccatgctaggagacaaagcatcctctaccccatctgtgaatcggtgctgtggccactgcgagaagcatgattcatgaggtatgatgctcttgagctcccagacaatgtgctgagttaataggttcacttgagatgtatacaccaaggctgtttctttttttaaatctagtccccaatttggagtatttttgcatgtttttgtacagagtaatccattcctctcattgtgtatcttaatctcctctgacttttccattgtctttctcaatcccaccctttgctcttcggatctcaccaaccccccttaaaaaataaatcatgtttgagcaagaaggtagaacacgccctccctcatcttggttttaattgctttggaaacgtgttctaccctgtccagggtttgcataacgtgaattaagtgaatgagatgttctagtattatatcttaacctgataagactatctaagatttctagtatatggtgcatttgctttcctgtgcaaactttggttcagctgccctgcagagaatctcaccattttcctgccagtgccagtataaagaatgcaggagagctaaacctgggtacatgaaggtcagaggggtgaggacggtcgagaaatggggagaagacttgggcttgagacgacctgggcttttcatgtgtagctcactcagcagtatgaggatgactgacacaccagtgggtggtttccaagtgaggcaaatgcccatttcccctctcccctcacaccttgcctggcttcttccatgaagtccttgctgcttttctgcctccccaaaggtgaggggaaggggctggttggggatctgggaaagccagttctctgttctctcctgctggtgatggactaggccttttagaactagcaagatccctcacacagctgggagaacacacacctttcttactccagacccattggtgtgtctccagtaacaaaattattggactcagcctccatatttgacagcaaaagtggccagagggagttgaaatatcttgaagaaaaggaattttcactaagatatgtcctctccctctcccagagtttagctgtttattccttttttttgtttatattgttctcatctgcataaaaccagtctcttgcaataagcctgccgcagaatcaaagtctgtacttcaaaaggtaactgcaccaagggatgggacagtgtgcatcaccctgatctaatcattgtgacgttggtagcttcctaaatactgtatgtaccttgaacaagggttttatttttgttttgttctgttttgctttttgtttttattggtaggctaaggtaattaaattttttaatttgctgttactttggttgtattttctgtactataactgcctacagtatgtcttttgcataaaatgcataagggtttggggatgtaaatggaattttattcatattttgtccaaatacctcttgtaatttgtatcaaaattcttgtacaatttttatattaaagatttatcagtcactg

SEQ ID NO: 16415 - DNA, 157 bp, Homo sapiens
ttttgaaaaatagtaatttagaaattacacagtacttttaaaagcagacaactgagaattatttgttggacaaaaaagaattccctaaaatgacaaaaaacaaaaaacaaaaaaccttcaccacttccagagcacttgaataaaatgagaatcactt

SEQ ID NO: 16416 - DNA, 3199 bp, Homo sapiens
agacgtacccatttaatataactatgatgcacttaaattgaagctatgccacaggatagaaaatgaattacaacttaaatacatgttggaagtgtaacactgtttttcaaggtttaaaaaaattcctaatgccttttagccttctttaatatttttaggtaaggaaagtatgtttggattttttcctctttgtaggtatatgagattgaaatgtgaagtatttggacaacaaacgtcaagcaatgggaagccattttgatttcttgagtaatcttgtaagcattaagtgaatgacaaagtagtagtgtaacttatttcttatgttataacttcagtcaattaatataaggatagtttttgttgtatgttcactaaatggttaatataatagccattgaatatactaatctttcatcttagagaactatacaacttttattgtttcttaatggaacattctggctaaccagaaaaagtgagaaaagtagtaccttgggatgtgtagtcaagatgacaaattttaagactggaaaagctctaaacaggcttaatgattcttcaggtagaatgatcctgagaagtgatgtttgatggaataaagtgcatgtgatgattaagtgaagactggggcagaatgatttaaaaaaaggaaaaagatggaagatgagtagacacttgcaaggaacactgtcaaactataaatccattcagtgggttgtataacatttatatttagtctaatttagactttgataatttaatgctacttttatattttaacaaaaatataaattaaaattttcattagtctgttttgttgttgggtttttttgtgaggtactccctgttgggggaaaggaacaaggaacaaccatcagaatcccccagtccctacagaatagcctcacagtaacttgagaaaactgaacttggggttaaataacttgtcacacttgcagtctcctgcctcactccttcaggtgccctgcctagaaaaagacttgtgtctagcatccaagtgaacacatactattgccctctgtgaaccaggaggaatggaacaggcaatggaagggtgatagtacctacaataccctttgtagaccccatctcactaccatcaaaatcttgtccactagcccccaaaaaactggcaaggaaagaaggtggaggggaaatttatggaagtagatggcttaatagttatttcttttatcttgggctgcctttctctaagttggttgtcctgtcccagtgtgaagacccatctttttgtgagaaaagacaaaagaaagcacatgtaactaccttctttgcaatggaaaaggagaaagaaaaaatcttctcctaagttgctgttttcttttattagttaataaaacaaatcagggactatgcaggtctatggggaaacctttagtctgctttaagaaaactcagtatctgaaaatcttaacttagcatgtgatactgtcttatcagcatctgcagaagtgccaaagccactgctagacacttaatgtgtattatttcatttaattatattttaaatgtgcttccttggtaattcttaagctcgagaaagagtttgagaactgctgctaggaaatagagattcacatttaaccctgtggtacttttaagaagcaggtacgttgttgcatatatacttgggtagagattggtaactatctgatagggaagctcaagttggccacccaagtctgagaaacccttaattactgagaatcaaaagagcagaatgtctgtagacattttggatttgtaaaaatcacattgttgagttatacctgtgatgggctgaaagtttttggcattctttcctgttcttcatatgccagtaccataaacaaaaagtatctcagatctgtcactttcttctcctaaaccaatgtgatggcagctttttgccttcagccttttccctatccagtatctcctacatagttaccttttgatcttaaggaactgttttgattgggtcacttccttgcctaaaattccattgattgttcattgttaattctaaaatagagttcaaatttaaaggcatgtaagttcccctgtaacggatttcctctactcccccttccgctgtaatctcccatttttttactgaaatgcttcagtgagcatgggtctttagaggtcttgatatacaattttcctgaagcaggaataccttgctttcctctactagtttaccacaattacagctctcttttaagcctcagaaaaaaatctcacttccgtcttgaagtcttaatccacgctttttatatccatgtgcctactccttctctgaaatctcctatggtttatctttttattcatttaatatcccacgaattgattttattatatattttttatggttgcatgtggtctttctagttatagcaatatacacatacatgcataaatacatatacacctatgtaaatgtgtgttgggagtatgtattcacacacatacatataccccaaggccatgtgtcatctttatcaatatttaagttttggaattgttttgtttgcctcctatatcatggaataaatggtaaagagggctaatttattactctaagtggatttcttattacattaatatcagacatatagaatgtactttgttttactatttgtaagatacaaaggtatataaactgacatacatcagcttgaaacctgagataatgctaaaatgttctaattattttaaatgtttaaagaggacaaccatgtaatgttgctaaacatgaaaaatgtcatcaagtggaataaagaatagctgaagttaacatttgggggaaattgagctgaaaacaaaaatatgagtattttgataccttttctttaccatgagactcttgactatgaagtcaaatttatctaaaggaaaaacaggaattctggagacctgtgtaaaagcagactattatcttcctactgtgagagtactaaaattaaaatacgtttaatgacgttttcctcaatgtaaaagcattgaagtaaatgtttcttttatgttgcagatacatagttgctctagagatcacctttttctttatgcattgtgaatagcagtctgcatcctaagtttaaaatatttgagaatcctctatgggactctctgtaaatgttttaaatactgttgttttcaataaatattttatact

SEQ ID NO: 16417 - DNA, 486 bp, Homo sapiens
acctgcccctatcactagtgcatgctgtggccagacagatgacaccttttgttatgttgaaattaacttgctaggcaaccctaaattgggaagcaagtagctagtataaaggccctcaattgtagttgtttccagctgaattaagagctttaaagtttctggcattagcagatgatttctgttcacctggtaagaaaagaatgataggcttgtcagagcctatagccagaactcagaaaaaattcaaatgcacttatgttctcattctatggccattgtgttgcctctgttactgtttgtattgaataaaaacatcttcatgtgggctggggtagaaactggtgtctgctctggtgtgatctgaaaaggcgtcttcactgctttatctcatgatgcttgcttgtaaaacttgattttagtttttcatttctcaaataggaatactacctttgaattcaataaaattcactgcaggatagaccagtt

SEQ ID NO: 16418 - DNA, 37 bp, Homo sapiens
gattttttgagtaacaaataaataagatcagactctg

SEQ ID NO: 16419 - DNA, 173 bp, Homo sapiens
caggaaaagccatatcttgcaccagcagcatgaatggtccctccacactctgggctctgggctccttgacctcttgagaagaggcagctggcacacagccctgggtgccaagtgtccctccttggtgaatttgaggagagatggattcacactgggcccattcacttcacagg

SEQ ID NO: 16420 - DNA, 1473 bp, Homo sapiens
ggatataacaactggatgcatcaagaactattgtgttttttttttttggttttttttttttttggttgtgattttttgttcttgttgtttatatgaaaacactcaaaatgatgcaaccaaaagggaaaaaataaaaatcaaacaaccttcagctttatttttctttaaagccagtcatcatctcttgataaaggagaggttaaagcaaaccagcctcagcggaccactcttctctccaaggaaatccccgggaagagttagcctggatagccttgaaaacaaacaaatcaaacacaacacaagaaaactcaaagaatgtgtatggtatcatgtatctctctgtggtggttcattccacaggacgaatgcatattcaacacactgccttattacataactgatctatttattatcgcatacagatattctaagtcgttgagggaatgacaccatcagacattataagtacttggtcccgtggatgctctttcaatgcagcacccttgccatcccaagcccagtgaccttactcgtataccgtgccactttccaccaactttttccaagtcctttaactcgttgcagtctgtattttccaccttttgtttttccagttccaggacacagattatcaactggggggaccaaatagccaccttgattttcttctttgtggtctttttcctgaaagttggggcccagtccttggctgtatccatgtaatgatcttggaccatggtagaaaatgcaccaaataggatcatatgaattgctgtctagccttagtcaataaacttgtaggacttttaaacaaaagtgtacctgtaaatgtcctgaatccagcattgttgagctgtcatcaacattcttgtgtctgttttactgttacaatattaggtgaatatggaagtaaaggcattccacaggatcatcatttaaaaaaaaagaattctggtcctgttttctaaaaaaaaaaactgttgtagaaattcttaatttggatctatttattagtcagagtttcagctttcttcagctgccagtgtgttactcatctttatcctaaaaatctggaatcagagatttttgtttgttcacatatgattctcttagacacttttatatttgaaaaaattaaaatctttctttggggaaaaattcttggttattctgccataacagattatgtattaacttgtagattcagtggttcaatacctgtttagttgcttgctaatatttccagaaggatttcttgtattggtgaaagacggttggggatggggggatttttttgttcttgttgtacccttgttttgaaactagaaatctgtcctgtggcatgcaaaagaaagcaaattatttttaaaagaaaaaaaccaaagtacttttggtgtcattattccatcttctccataagtggagaaatgaaaagtaagaacagctcatcttcaaagtttttactagaaattc

SEQ ID NO: 16421 - DNA, 671 bp, Homo sapiens
agtacagcattccagtgtgacacgagaaaagacaggctgtggattcagtgcagtaaataaaacacaggaagtattctggtggaaaaataccttgtatttgataaaaatccattacatgaaataactgcacatacccccaaaactctagacataacaggctatgtttttcacacattgtatttttaagacatatatattctccataccctgcttcaccaaaattcctgcttcatttggattttatacaagttatacttacattgtatgaagtctgattattttcctgtaagtttaatgagaaataggagattagctgcaatagattcaattaaattaagaaaccaaacttgataacctaaattacatgtattctttttcacttccaagttcccaaatagatctgtaggagaagagggatggaaaatatattccacagttgcctagaataacatatttcatagacagatgtctgtcttcagatctaataatactcaccctaaacattagatatgtttagaaaattaaatatctttccaagccctatgtcttagctcaggttgctataatagaacaccataaaccgaatggcttaaacaacagcaaacgcttctcacagttctggaggctgggaattccgctcaggatcaaggcatcagctaatgcagtttctg

SEQ ID NO: 16422 - DNA, 200 bp, Homo sapiens
agatctcctagcctgtgcctctgggactggacaattgcttcaagcattcttcaaccagcagatgctgtttaagtgactgatggctaatgtactgcatatgaaaggacactagaagattttgaaatttttattaaattatgagttatttttatttatttaaattttattttggaaaataaattatttttggtgcaaaagtc

SEQ ID NO: 16423 - DNA, 351 bp, Homo sapiens
aatgattctcattgattaatttgccatataacacttgcacatgtgactctggtcaattcaaaagactcttatttcggctttaatcacagaattgactgaattagttctgcaaatactttgtcggtatattaagccagtatatgttaaaaagacttaggttcaggggcatcagtccctaagatgttatttatttttactcatttatttattcttacattttatcatatttatactatttatattcttatataacaaatgtttgcctttacattgtattaagataacaaaacatgttcagctttccatttggttaaatattgtattttgttatttattaaattattttcaaac

SEQ ID NO: 16424 - DNA, 406 bp, Homo sapiens
aacctgtttcaacatggaaatgatctgtattgactaatacaccagtccacacttctatgacttctgccatttcaaagactcatttctcctataaccaccgcatgagttgaatcaaaattttcagatcttttcaggagtgtaaggaaacatcatgtttacctgtgcaggcactagtcctttacagatgaccatgctgatagatctaattatctatctattgaaatatttatttatttattagatttaaattatttttgtccatgtaatattatgtgtacttttacattgtgttatatcaaaatatgttatttatatttagtcaatatattattttctttttattaatttttactattaaaacttcttatattatttgtttattctttaataaagaaataccaagccc

SEQ ID NO: 16425 - DNA, 268 bp, Homo sapiens
aacctggttcaacatggaaatgatcctgattgactaatacattatctcacactttcatgagttcttccatttcaaagactcacttctataaccaccacgagttgaatcaaaattttcaaatgttttcagcagtgtgaagaagcttggtgtatacctgtgcaggcactagtcctttacagatgacaatgctgatgtctctgttcatctatttatttaaatatttatttatttttaaaatttaaattattttttatgtgatatcatgagt

SEQ ID NO: 16426 - DNA, 361 bp, Homo sapiens
aaactggttcatcatggaaatgattctcattgactaatgcatcatctcacactttcatgagttcttccatttcaaagactcacttctataaccaccacaagttgaatcaaaatttccaaatgttttcaggagtgttaagaagcatcgtgtttacctgtgcaggcactagtcctttacagatgaccattctgatgtctcctttcatctatttatttaaatatttatttatttaactatttttattatttaaattattttttatgtaatatcatatgtacctttacattgtggttaatgtaacaaatatgttcttcatatttagccaatatattaatttcctttttcattaaatttttactat

SEQ ID NO: 16427 - DNA, 347 bp, Homo sapiens
aaactggttcaacatggcaatgatcctgattgactaatacattatctcacactttcatgagttcttccatttcaaagactcacttctataaccacgacgcgttgaatcaaaattttcaaatgttttcagcagtgtaaagaagtgtcgtgtatacctgtgcaggcactagtcctttacagatgaccattctgatgtctctgttcatcttttgtttaaatatttatttaattatttttaaaatttatgtaatatcatgagtcgctttacattgtggttaatgtaacaatatatgttcttcatatttagccaatatattaatttcctttttcattaaatttttactatac

SEQ ID NO: 16428 - DNA, 363 bp, Homo sapiens
aaactcattcaacatggaaatgatcctcattgattaatacatcatctcacactttcatgagttcttccatttcaaagactcacttctataaccaccacaagttgaatcaaaattttcaaatgttttcaggagtgtaaagaagcatcgtgtttacctgtgcaggcactagtcctttacagatgaccatgctgatgtctctattcatctatttatttaaatatttatttatttaactatttttaaggtttaaatcatgttttatgtaatatcatgtgtacctttacattttgcttaatgtaacaatatatgttcttcatatttagttaatatattaacttccttttcattaaatttttactatac

SEQ ID NO: 16429 - DNA, 361 bp, Homo sapiens
aaactggttcaacatggcaatgatcctgattgactaatacattatctcacactttcatgagttcctccatttcaaagactcacttctataaccaccacgagttgaatcaaaattttcaaatgttttcagcagtgtaaagaagcgtcgtgtatacctgtgcaggcactagtactttacagatgaccatgctgatgtctctgttcatctatttatttaaatatttatttaattatttttaagatttaaattatttttttatgtaatatcatgtgtacctttacattgtggtgaatgtaacaatatatgttcttcatatttagccaatatattaatttcctttttcattaaatttttactatac

SEQ ID NO: 16430 - DNA, 1986 bp, Homo sapiens
gtctaaggtgtaacacctttgcagtacgtcatgggtgatctaatacttccccttcagttgtatcttcttacagtgattggtacagttattagatataaaggtaactgatgttattcgtcttgtatggcttttagtatgtttatcaagtggctaacaaatgcattctgaaaatgtatttaacatagctgttttaacaaatgaaaaaaagacgtagaaaaatgtttagatgtctttttgtgatgttatataaaattgtagatgactgtggtaaatgtgtaattatgtccattatgcttcaaagttgagttttcatctttgactccaaaatgtcagagggaggccgctctaaactaaaaataacgaaaggttgccaagtattaatactagttacctccctcttttcgtagtttttgtcatgtctgtcaacttactcgattgtgtggttgcattcagaatatttgaagtttcttacgtagacagaaataataaaaatattaactaggaaaaaacagtatagcaccaagccagtatttggtatctctctctagagcgagcaagagagggagagaggaggaaaaaatacacataatacaaacatacatgcatgcacacatacatacatatgtatacacacacataatttgaaaactgattggcacttcaacgatgctgaaattgtttttaaattgaagtttctttcttccacaaagcagccgtttctattcaaatggaaattcagtaccagagaataaatgtctatgtagtcatactgaatttagatagataagggctacagcatactaaatcgacaaccaaatttgtcatgtgactaaaccgttacttcagatgaagcttacattactgttttctgcttgtgtattttctgtagagtacttttacacagattggtaaagttcaggtttcagagaactgcttttgtgcagaaaatttaggttcttttttccacctttttggtcagtaaaacttaatgaaaaaagcaaagaaaaaaatattctgaacaaagctatagggttttaagttcagcctcccaacttagtcatcctaacatgattattttgtgatttggggtgcttgccctggtgctgttccagtccatgtgcatcctgagctgtgtgatctgcctcgaggctatgatctgagcaagcaggagataacattttcttctgcatcaagtgaggaaaaatgtgcttttggccatgtctcaaagacaggaccaacttcagattcccaaagaagccagctacagagcctctggaacactatggtcttacaagcagtactaaaatcaaccctcagcctcttcaatgccaaaggtatccctattggttgagaaccacatggtaatttttaatgggacttttatcagcaaatggagttacaggaattctctgtaatgagtgattctgaagaggtactttcctggaataattgtctacctgaagaaaaaaaatttatatatacattgtgtgtgtgtgtaatacacacacacaaccccctatacctggaagattgtcagcatgtaaatcaggaacaactttctccttattgacaatcccataataaaactcaggaaccaaggcaaaatgaattggcttctaggggtctgaaccttactgcccatacaagtgttgattcattttaatgctgtttatgatttctgcattggcagaaattttcatactttctatgtttttttaattactcagttttttattactaaaaatagcacatttgagtacatttgaaaagtagaaaaattagaaattattaactttattgaataagcaagaagtgcatcctaatcctttgattattaatgaggttgaatatttgtgtgctatcggtagctgtgtttctttgatcagatgttcctgtccttttgcccttctgttatctgttggagttgctttgtttttcgtatcaagttataggatctctttatataataaatgtaatttaacttgc

SEQ ID NO: 16431 - DNA, 13 bp, Homo sapiens
cacctggtccaac

SEQ ID NO: 16432 - DNA, 507 bp, Homo sapiens
aaactggttcaacatggaaatgattttcattgattcgtatgccagctcacctttttatgatctgccatttcaaagactcatgtttctgctatgaccatgacacgatttaaatcttttcaaatgtttttaggagtattaatcaacattgtattcagctcttaaggcactagtcccttacagaggaccatgctgactgatccattatctatttaaatatttttaaaatattatttatttaactatttataaaacaacttatttttgttcatattatgtcatgtgcacctttgcacagtggttaatgtaataaaatatgttctttgtatttggtaaatttattttgtgttgttcattgaacttttgctatggaaacttttgtacttgtttattctttaaaatgaaattccaagcctaattgtgcaacctgattacagaataactggtacacttcatttatccatcaatattatattcaagatataagtaaaaataaactttctgtaaacc

SEQ ID NO: 16433 - DNA, 226 bp, Homo sapiens
gtggagggactagaggacttctccagacatgattcttcatagagtggtaatacaatttatagtacaatcacattgctttgattttgtgtatatatatatttatctgtgttttaagattgtgcatattgaccacaattgtttttattttgtaatgtggctttatatattctatccattttaaattgtttgtatgtcaaaataaattcattaatatggttgattcttc

SEQ ID NO: 16434 - DNA, 490 bp, Homo sapiens
acatccccgattgaaagaaccagagaggctctgagaaacctcgggaaacttagatcatcagtcaccgaaggtcctacagggccacaactgcccccgccacaacccaccccgctttcgtagttttcatttagaaaatagagcttttaaaaatgtcctgccttttaacgtagatatatgccttcccccactaccgtaaatgtccatttatatcattttttatatattcttataaaaatgtaaaaaagaaaaacaccgcttctgccttttcactgtgttggagttttctggagtgagcactcacgccctaagcgcacattcatgtgggcatttcttgcgagcctcgcagcctccggaagctgtcgacttcatgacaagcattttgtgaactagggaagctcaggggggttactggcttctcttgagtcacactgctagcaaatggcagaaccaaagctcaaataaaaataaaataattttcattcattcactc

SEQ ID NO: 16435 - DNA, 3341 bp, Homo sapiens
gtcatgatgatgggcagcgcccgcgtggcggagctgctgctgctccacggcgcggagcccaactgcgcagaccctgccactctcacccgaccggtgcatgatgctgcccgggagggcttcctggacacgctggtggtgctgcaccgggccggggcgcggctggacgtgcgcgatgcctggggtcgtctgcccgtggacttggccgaggagcggggccaccgcgacgttgcagggtacctgcgcacagccacgggggactgacgccaggttccccagccgcccacaacgactttattttcttacccaatttcccacccccacccacctaattcgatgaaggctgccaacggggagcggcggaaagcctgtaagcctgcaagcctgtctgagactcacaggaaggaggagccgaccgggaataaccttccatacatttttttctttgtcttatctggccctcgacactcaccatgaagcgaaacacagagaagcggatttccagggatatttaggagtgtgtgacattccaggggtcgtttgcttttcagggttttctgagggaaagtgcatatgaaatccttgactggacctggtggctacgaatcttccgatggatgaatctcccactccagcgctgagtgggagaaggcagtgattagcacttgggtgacggcagtcgatgcgttcactccaatgtctgctgaggagttatggtgaacccacaacttaggccctagcggcagaaaggaaaacctgaagactgaggacaaagtggaggagggccgaggtgggcttcagtaagtccccggcggcgctttagtttgagcgcatggcaagtcacatgcgtaaacgacactctctggaagccctggagaccctcgcccaactccaccagatagcagaggggtaagagaggatgtgcaagcgacgacagatgctaaaatccctggatcacgacgctgcagagcacctttgcacaggatgctggcctttgctcttactacactgaggagagattcccgcgggttccgcaggcagactacacaggatgaggtggtggagtggagtgagagcaattgtaacggttaactgtaacgttttctttcacacacacacacacacacacacacacacatgctaggatgcggaaatccccttatgacttgctactttttgattttgtgatattttgtactttttagttgttcagcaactgtcttatttaatggggagattttaagtaacataactagtggctctcagttaaaatgtgaggaagaactacagctcttaaatgtagcaatggcactgttgcaaactcagtgcaaacgcctagattgctttcttcttaacctatttatttctttgttaaatttttctgattgtttcctttatagagtgtctcagggtgcagaggtcagactaagaaatattccaaatgtcttttagaagatagatgcacttatgcagtaaattatcttgggatagttcccaaaagattgctgaaaaagtagattgagtataaaaacttgaaaatatatgatggctcgtgggatgtcctactatcactgaacaaactaaaggtgcactgctttgggatttaatttccagggttgcttgatcattatatcattggaacaactgatacttcactactttaataaagaattaacagagattgaactccaagaggtgggtaatttggtttaaaaatacatgttcatgggtttaccactaactcctgagaaatgttaaaggttcacaggggttcccttctctcaatgtttgtaataattgctcataagcaataccagcaattcataaaaactgcttacttatgccatagaaaattaaacacaaagtgtatacatgtattatgcttctaaatgctcattctaccagatacacatttaaaagagaaaaaaggaacagaaacaagtcatttgagagtggagacttataagaaggagtacatttgagttgaatacacaaatctttacttctctaccaattcctattcccaaaatgaacatattactggggaaagttagttgagaatcagagcatatgttattggggaaaggatatgtttattgacacataatctgtaccaggtatgcattaaaatatatttgttaatttaatatttaaacctgagagataggtattgtttcccagatgaggacaatgaggcaaagaaatatcaagtaacttgccaaaggttacaagatattcattccatggatgcacaaagaagtgcatctagttccacagctgattatggttgtcttgcttttcttcccattgcaccagcttgtcctccaaaatcatgaatgatacacatgaagataactttttttaaaaaaaagcagaaatacacaatgatctcccttgtaagctcctaaggtggcttttctttctctaacttctagtaaatataaacggtttgtttgaaaactattttaaaatgtcaacaatatggagaataaccccccccaacacacctataaaaacccaaatttttggaacaaagataatggaacctccattttcaaactgaagcacagggacagaaaatatatttctagttatcacttaagcactcaatcattagaggctacaagaataatatttttaaagttacagtattttacaattattagaaaacattctatataaaagaagtcagttgatactttaaaatctcccatttggtttataaaatcccttaatttgacctctatatcttaaattccaagatgtttaaatttgctagttgcattatactgggtcatgaaaaattatcccttgaaatagatatgaaacatgttacttcatttctggtttaaataacttgtggaatctttcctaatgacaacctgatattaagggaaactaaagaaaatgttattgtggatcccacagtactatattacactgttttttttgtttgttttgttagttttttttatttaaagcaaacctcaaacattattgggtatcaattaccacctggttgtattgaaatagtaacttatcaatgccatgtaaaaattaattccattttcgaagccacctggcagacaggtttagctgtttcatcagcagcctaatatatactgttaaatttgttaaggatttcactttgaaggatacatgcaaaacatatagttactattttcatgagtcctgcttctagctccattgtggaatacagaaaattaaatatacctgttaagttcgtatctaaacctaagacattaccaaggtttgtacaaattctactacctgacatttattccaagaagatctggaaagttaaataaatttataaatttaat

SEQ ID NO: 16436 - DNA, 2450 bp, Homo sapiens
tgagctcttgtcctcagtccatttatatatgaaaactatacaacaaaggcaagttaagagaaactttatacattagtaaatgtctttgtaagtcagtgttgagatggggataaaatgactacttagcatcctaagaaatatgtgagattttttattgctagtatttgaattaaaacttcttaaatatcttttatgtttgaatatggacaagaggtacagggtttttacctgtcacattgcattctattgccttctttgaagaaggtggaccttttaaagtgtttcagctaagggaagacatttcttttctttttacataactgccttgaacctgtgagtaaatattgaggctttgtgttgtaattcttcagttggttgtgtcttttttttcccccctttttttcctttttctgattagctttgtgtttggtttacatttaaagcattgctgttatgtctgtttaagaaaagtattttgaagtttacatttttatttatgaagtttaaaacagtatttattttgtaattatgatttgggttggggaagggggggctacattataaacgcttattgtaagaatactggagaacttttcgtaaagcagtaccttgccaaagagataagagcctctttgatgtgggtttaaaaaaagcatctatttttataaaaaagaaaatttggagaaactttttactggtcctggaacaaatattttgacttgaatactttgagaaatctcttcatatgacacctagtgagcttttaaaatttaccaggaaatttgcagcggttggaaaatttagaaagatttatggtgtagaaaatacttttgagatctttgtatgaaaggagtagaatcaatggggggaaacactgctggtttcatttttgtaatcaccagtggagcgtctgatcatcctggttattatgtgataggtggctcacattgatttgtgattttgaaacaaataaaaaaaatttacaaaagaatatataagagcaggcaagaaatttaaattaccgagagatgggggaaaaaatctgttcttcctaaagaaatcccttcagatagagctcatggtgtttagtgatgtacttgcagtattgtttgaagaattgttttgtcttaaggaaaaaagacgttgcacatgatttgtactgcagcaaatcagcaaaagtgatctgagttggatatatttgaaggtattttgaaagttacgttcaaggctaacacctgagctttgtgtaatgtaaataagaccttgtgtttatgaacctttcagctaatttaattttttttcccttacatgccaagtgatgttcaggttttgaatgtttttgtatcagttttttcctttgtaaatggcattaacattgttacttgaggtcttgcttaatcacttttgttgtcctgaggacttgaatttacagtgcatcagatttgttgcaaattttgtctgtagatagtctagcttcagctgtttatggtgatgctacattttggtttataaatatgtttgtggtataaaaaaatgagtataaccataggttttgaacaaatttccttacatttttcatacaaaaatcataaatatctgtatgctattgaaatttaactttgtatgatgcttaaaaaccactatttggggaaataataaaataagtctttaccatgtatgaaagaaattttaaaaaatacaaaatattttctgattagcatctagcttataataaattttcaaaaaagctgaaggcaaaaatgccttcatcaggatgcactgagaactatatagttacgtcctgctttttgtataaactgagatgctcacatgcttccccttagaacaggcaatgtgctatgcataacatagttgtacattatctttgcggttgctttgagttttattttttattatttaaaattgtagttataaaatttttcagtatagtacagtacatatactgtgaggcgcgtgctaaagtgaataagcgagttttcatgctgacccactcaatgctattcagaaatcaattggcttagcactttctcatatccttaggtgcatttagattgccagagttaaccttctgcgtttaaaaaaagaaaaacactaaaaaataaaatacatgtatatacttaaaaaaaaataataaggtttccctcaagggaaaacagcagctacatgcttctttcctatactactgtagcaaaccaaggcattgatgagagggcatgcaaattgtgcttcactttacagtgttttatcagagcacttaataaaatgtaaggctggtatttatttgaagttgtacagtatgacttaattcacatctgttggaatagaaaatatattctgttgagtatttaagaggctgtacatgttttcttttgtgtttggattctttgtactttttcatgttcagtacatcaataaacaaagttgaaggg

SEQ ID NO: 16437 - DNA, 1287 bp, Homo sapiens
ccgaggccgcagccggtgagaggcggagcctcgagcgggcccctcctcctccgttcccagctacccccgacctcgcgcacgccctggcccgctccctgcccgcggataccttggactacggtgccttcccgcccccaccagtggacacttccgggtggcgcttggccatccgcttggtggaggtcgagtgggtgcaagggccctcaggacctcccacatgtacagttcccctgcctcttgccccggctagtttccctggagagaggcctagccaacaacgaagggacggattttaaaacagcgagaactgggtgccaagaaacacttcatattccctgaacttttctggatgttgtgcgaacctgttgtatttttttttttcctgtattttggttctgagggatgagtaatgtgtttttagttggttgagtttatccattcttcaatcccctaaagccttcagctattctttcatatgtggccaacattttaagtacagtgtttgcttttataagtcggtgttacttggatgtcctataaaatacccactttttataaagatgatatttataacctaggaactcatgcctgtcttggctgcagtccctgtacatctaatatatactgatttgtttgcccccagagaatttttaaggtatctgcctatatcgtgatcttttgaaatggtaaataaatctggtgcattaaaaattatctgaaaggttgcggcgagtattatttgaagtgtgttacatttttatatttttaaaaagatacctttatgaatatactaatttaaatctggttttagttgtccttagtaaactatcatgttcttttagcttcatgtaacagtgatcttttaaaataatctaaagattaggtagtctaaaagttattttaatctttaatgttcaattagcttaattagtacgtagataatttgccttattttgactaaggacttttaagaaattataaattacttgtatatcaaaagttcccctaacaaagtaatttaagtctcagttgttatttcaatggcacaaaaaagtgactagtttagcaataaatgtcctaaaattacttttattgcgcttcgttaataacacttttgccaactaagtaatgaagaggataccattgtgcctgataaaaaaatcataggtccaagagtgtttcaatgatggaaaacatttcaggggaaaaaatcatgaatagaattgtcaagggaataaaatatactagttatggcatagtccaaaagtattaaatattatatattac

SEQ ID NO: 16438 - DNA, 1615 bp, Homo sapiens
gtatttaacttgattttgaattttaggtatgtttgaacaaagccacatcatttaattttgtatctaaaatttatttggggtcttatatgttatttctcatgtaacccttattaggactcattttagccctaaattacctgtggctgtttctttttatttttttgactacttttatattataaatgtgtgttactgtcttatgaattcatggcaatatagttggatagcctggatactttgttagatgagtatttagctgtgtctgcaaatcttaaaagccattagcaaagagtcgtggtatttttttctttatttttaaatgtttgggcaccaaacctaaaagcaaaagattgacgaagcatgtttctcttaaggctacttgtattttacaatacaatattaaattatttaatttgagaaatttagttttgcttatatgcactttttaaatatatactattttgaagattccttatgtaaatgcaaatttcctagttaaaaccgaataacagagatctgaaatgactgagaaaaacttttttattaaaggaaggaattaatttaaggcaatttttaactatgtagaactaattgcccatgtttaattatagcagacacgccattctaacaggtatttgataccattggatgcattattctaggttttttctttaataaaaatggaacaagttttcatttacattccaagctgtcaggaaatgaagaatattttattatctaggattttatctgatgtagttgcttaaagatctgatgtgctataattccatgaatcagaaataataaaatgctatcattctggatctgaagacttttgatactttttcaaaagcaaaattaatttcaggaacctttgataagttgttgttataattaatctaattttgtatagtttttgtaaataaattaccatccttccacaattagggatgcttttatccccccatcactaattgcagttgtttgataccaaaataaatttacgtagagatccttaacttaaaataaattaattttttcaaaaaacataaatctggaactgttgtttctatatttgataacaaatacagtatattttatttataagccatggtctactgatactgtatgaggactttccttatatataaaagttgcagggattgtgttttattagctgctttaattatgttaattttagagagtttttaaatggaaatagaggacatttatgaaacgctggaattgcagttacaaattctttttgttgttgttgttcctgaacatgccttggaataattctaccattttttccccctccataaatctttctaataaagcatagaaaaagcctatatgattttaaatgcttctcttaagctggtaaacagatttgagttatgagttcattgttattgcttcaagatgaaaagacagtgatataatttttctatttcaacttaaaagtaatagttaatatgctaaagtagtacagaataaactttattgctgcttactaactacaaaatactgtagatggcatctgtatgattaaacatataaagtaaaacaggtctgagggctttgtagatgattaaagtctccaccttcatga

SEQ ID NO: 16439 - DNA, 991 bp, Homo sapiens
cagtggggaagagggacggatatttttaattgattagtgtttttttcctcacatttgacatgactgataacagataattaaaaaaagagaatacggtggattaagtaaaattttacatcttgtaaagtggtggggaggggaaacagaaataaaatttttgcactgctgaactgtgagattttcctgtgtaatttgggtagattttcaagagtgtgaacacaaatttaaaataagctataatcagcaacaacacaatgacaatgacatcttccccttaccttagccactaagaagacaagggctgttactcatataacttgcttttattacttaatgtacaccaaactgttgttgtcaattatcttttatttaacttctccaccttcattgctagatccttcgaacagcactgatacatttcaaggtcttgttttaggataactactttaaaattttttaaattatattaaatttataaaataatttataaattcatatattaaaacaatataagataatttcttgatttgtcatttataaatcctaaagtatatttgtttaatggcctatttttagatgaagaaaaagccagttggtaagctgtgttagtcatgtatcagttcagacagacgaggtctcaatttaactccaggcttagatccagtttcttttgcccttcactatttgaggtaacttcatttttcattctagttttgatatttggctgtttatttttgtcattttccattatttcaaagggaatttggaacatgttgaattttatcaggtggttacataagcaagagtacatcaaactgtattatttgaaagtctagaacctgtcatgtgaaattactatttttgagccctctatgtggtccaggcagaatagtagacacactgatatttaatccttaaaacccctttaaatgagggccagtattatctctgctttcagaagtagacataataggatgaatcatataacaga

SEQ ID NO: 16440 - DNA, 1931 bp, Homo sapiens
tttctttcaaagtttgctttttaaagcaaagttatcagctcactcagtttagatatggagattttgctatgtgacataacaaaatacagctggcaggcattcatattaatgacaacatacatgaatatcataaaattatgttctttgcattatattgagcaagcaggttcaaatacagtaactgacactcctcggtagttgacagttacatagtctacaatactagcactactattcttagcagtgcttgggtgaccatacgaactagtaaaaaggtctaaattattcatgaattaaaatgaatggattctcatattaacacaggtatttgacataatatgtattaagttatactaatgtttcaatcagtaaagaaataaaagtttaggatttattaatatatggaagtcaaagtgaggaacagagatagcttaaataatacactaagattgattttatgctcccagaataaaatcatagagttggaaaatatttttttgaaatgcttcctgaaatagcacaataaatttccttaaaatttcatagcaatttaaagcacaagcacaatgttcaggcataatccctaataagtcactattgattctggttataaagaaaggctgtcaccataatgcaggatcactacagtttaatgtcatactggcttccaaagtgggcatcacaattatctataaatcttgttttaaaaatacatatttccacctctctctgggagatttttattcaaattggtctgtgctgacactaaggaatcttcatgtggtccatggacagctatttctatctattcagtagatagagcaatgtttcccaaattgtttttctagaatactaatttccagagagacattcacaagtatttacagaagaagaaggaggtacatggtcaaattactacaggaaaaactagtagtttaaacaaggtgaaacaagattctttttcttttttttttttttttttttgagacaaagtctcgcactgtctcccaggctggactgcagcagcgcagtctcagatcactgcaacctccgcctcctgggttcaagcaattcttctgactcagcctcccgagtagctgggagtacaggtgcacaccaccatgcctggctaatttctgtatttttagtagagacagggtttcaccatgttggccaggctggtctcgaacgcctgacctcatgatctacccgcctcggcctcccaaagtgctgggattacaggcatggagcaccgtgcctggccaagattctttacaataggatttatgtaaaactttactaagctaaactgctctctgattattcaagagcaaagtattaaaaatttctcaaacttacttgacaacaaaacccattctttcagttacatctactaagagctcgtagttcaataacattccaaagaacgtagtttggaaaacactggcctatcggctgtaataggaagggtctaaagaaaattatttgctgagtcctcataatcaattggctataatcacaatttaataatttatcaatgcaaacagtacattaaaaactgtagcacaatctataatttttaccttcatatgcagagaaattaagaatttacatcttttacaaatatgtatatctctgaaataatgaaatatattgatgggtgaaataatatttctggtattttcttcattataacacgtggaatggaacagtggctagaggtatggatggagcaaggtcaaatatgagctgatggagctgggagctaaataagggtataatatgctacttctgtgtatgttgtgtatggtatagtatgctatttctgtgtatgttcaaattgtttatgtatataataaagttttaaaaatttgtatgtacttgacaattccttagaaaaaagaggctaaaataaaatagatctatgtcat

SEQ ID NO: 16441 - DNA, 54 bp, Homo sapiens
agaaatcaaggaacccggtgaagaaatcttattgatgaataaataactttaatt

SEQ ID NO: 16442 - DNA, 5377 bp, Homo sapiens
tgctccacctcaccctttggaagaaaggaaagctgtttcctcctggtgccctgagcgggcaggaggtggaccaccctggctgaaatgacacacctactcccaggaacagcagaggtggaggcaagcagtgactcctgagagacattccccactcactttgtgtgctcttaaccttctgagtgctgctagcccagacctgtggacgaggcagaccacaacgtgaaagaaggaccagccccttgaccgttctggctggggaattgtccacgaggaagcctctgcacttccacacatggcacagttctgcctgtgacctgccgcctaagctttactggaattcaggttttgagactgagatgcgtgttcgtatttttccacttatctgtcttgtcagctggccgacttctctgtgattggttttttaagtgccgggtgaattttggacctctggatgtgcagcaagtttttatgcaataagccttcctttcaggtctctaaaagctcctgctctgatctgtggtttaacactgtgcagggctgtggagctctgagacacctgaacccctacccatcccctgcacctccctactctccctgccgaggcgtccatagcatttccctaataaatagttttatcagggacactccatggggtggcttgtctctgccccaaacagggtcttcacgttctaactgcagggaagagactggttactagcgtaaagctgacaagttaccagttcacctgatcagaatgtattttttataaccaccatcattccttgtctcttcagtggaagatattctttcctgtttcccagaagagagaaataaaagtcctaaataactaagaatgatcagcgggagcgttgggcatgattactgcagtgtttgttctttattaaagacagggagtcgtggctgtctctacataatactaacatttcagtgaaaaaagtacaattggttatttggtacgtgtagatttaacacccagacggctgacttgtaaccctccccactagccttctgagcatttaaacccagccgtcattctctccccactccacgctccccactcctctgccacgttatgttacggcacaaaattaatttctgcccctgtgattgggccacggttgccaaggtaacagtggagctggagctaacttccttctttcatcctttccaatttttctattccagaagacagtcagaataatgcattctgtactacatcctgccttttgaaacctaaatgagttttcgttgatgaaatgttgccttctctgattcattcacaaaactgtggtggttctgaccacctgtgacgaggggggtcataatacttccagtgatccttttaatttagcaaaatatttgtcggtggagggaagtagataagaatgtattagtgtattttaaagtaataatgattaaagaataactaaatgactctgattttgttttatcaatcataatgtgttaaagccctctgtggctgccacaaaagactagaatcatgaaatctttgtccaagctaagaaagggctgtctctgtgggtacagtggcattctctgttgacctaaccaagcagcctgaaccttgctttgtgtctcgtaaaggtcatctcacggaatccaattgctgctacctcaccatgttgctgtgccctggtcaacaataaacatacttttgtcccccttcctaagtaactttgagaggacaagataggcaaagttttttccctacatctcttttggccaaaagaatatctgaccatcacagagatccagagaacagaaacaagagcccctaagtcccagcctctgcaatacacagttaccagatgggaatgcagcacagtggcacagagaggtaactacggagcccatgccctggaggaactctgtagctgtgcatcatggaacgccacaggatttttacattaaaaagttgaatatgttcctgcatttcagcagtgcataatcgagcaggaggctggaatctggagacctttgttattcattctttttaaggttattttttattaactgtgcatatgaaatttccactcaatttaaaaatccaaatctttttaagcttcttggaagaatttcctcctgcttatattgttaattgcactaatgaactcttctagggtaaattctggcaaactaccctttttttttttttaatcacagaatattcctgttcccacagaactttggcacattctgaagaaaatctctgcagtcaatttttatctcctctgcttgactgcatctaactgttcatctctgttataaatggagcttcagccctctgggtcagagactgacaaccctccttcttcttcctaacctgtcctactctccttctttttctgctttcattttaattttgggaaattttaaagtaaaagtttcaaagttgaaagattatagtgagtacccttatgtcctttagtgcatcagttgttaatgttttgccttgttttcttttcttccttttttttttttaagagaaggggtctctccctattttacccaagctggccttgaaccccttgcctcaagtgagcttcaaccttagcctcctgagtagccaggactatggcatgtaccaccgcacctgcctcacattttctttctcactgtaaatacacattcttattcttgaaccttctgaaaataagttgcagacatcatgaaaatgtaaaatacttcatcatattctttcttttaataagagcattgtcctataaatctgcaatattttcacgcccatgaaactgaacactgatactgcataaatctaatatatgatccatattcaaaattctccagttgtccccaaaatatcctttatagctgtttatttttaaatccaggatccaatcaagaattatacgttatatgtagttgtcattctcttttgtttcctttaattgattagagttgcccttttgtgtgtgtctgagtggtgggtggtggggtggtgtttgtgtatgatgtgcagtgtgtgtgtgtgtggtgtgtctttcatgacactgacattattaaagagttcaggcaagtttgtggaatgtcccacaatctagacttttttactgattgtttcctcattacgagatacaggttacattttttttcccaagactgctacatgtgtgatgttgtttccttactactgcctcacctcaggaagcacataatgtctacttgtctcttttctgatattaggactgatcaggtgttgtctgcctgatccaatcattatcaagttccataattcattattaagctctgaaattcaggacacatacatttatagagtgtgaggctgtgcatacgtacattcatcccttaatgttctcaaggaggcccaggatccccaaaatattataagcattgcagtcagatgatatagcactagcaaagcattcatccctttccatataacaggagggaggggaagaaggaagtttccatgtgcaggcaatacgtgagagcatgggcaagtgaggatttgtatgctccctgtagccagaggtgaaatattcaacgcttttattttttctcccgtcttcaatgacctcccatttggacccatagtttatttatagagagcacacactccctaattgtcagatggtttttttgggaaaactcttagatagtacagtgagttgtgaccctccaaaggatcacaagtacataaacagatacaaagtatttatgtggtattaaaatttcatggtgatggtgcaagggagagatgattaggaagaaaatgtcttacacggctgtaattgagaaatactgatctagagtcatttcctgcttcttaaattgttcgttttctcttccctgggtattttctcatttccaaagacccagagtctcagagccaggttaagtggaagaaactttgagaggtttcttaatcaattccttctatctctcaaaccatgccagtaacttccttggtgaaaaaatctatactcctctcacagttcttcgggcatggaaattctatagcattctttggtataaccaacccactgaaccctccacaacatcttgaattccattcaactcgagctgaagtattctttttgagtttcagtatatcttttctagtgtcccacttttagaaaggtccaaagatgatatataataagtgaaaatacaattaatcagagctttatttgcatatccattaaatatctgaaggctattaccagttgtgcttcagcctcctttcccttgcaattctcccagggtggcatcctctacggagtcttgttgctccattgttgaccactgatgtaactcaacgtgaaaccttcccaaagctctccacatcactctctgttatggctgtgaccagcagtgaacatgaaaagaacttatttcatgccttctccaaactatattgtttctttgctaagtccagacctgctttttctacatttataggttttctattttaatcgccatgcaaaattctttatcatactcaatcattttggtttatcttcctgacttcttacctttaacatccctgttaaagattacactgttgttgtttcaaaaaaaaaaaaaaaaaaaccttaattggcaaaacattaagggacttgaatagaattacacttatctttttgtgctgatttatgtcaatccatcattctggttattgatggaagcaaattgcttcctatgttctctaaaccttatgtcccttccatactccatgagtaccacactgggagaaaacaaaagcaaaaagattgtgggaaaagtatagccattatctttgaggaaatgtgtaccaaggcacaatcattaaaaggagttggaggcatcatttggttgacactgttgtcattcttgttctgatcattttggaccttgaagaaattggtgattctctcctagaattagacaaacaaagtgtgtttggaaataatgattgttttcctgccttaaaaaatatattaacagaaagcttttataacaggctgtttccctctggacaggtattaattctgagtaagaattttcagtgactacataaggatttgtgtaacttatgaaggaagagtccatttctaatcaaataattcgcctgttttactagcttatagtgatctgatttcagaattttcctgtatcttttttacatacatcagaaaaagaaatgtttactatatttttggttccatttatgattgtattaagcatttgactataaggaaaactaacaattaaatcaattagaaaagcaacataaaattaaatgatatttaggaaatcagttatatgtgagcttgggtattcaaatgtcacaaataaaaagcatataaccatt

SEQ ID NO: 16443 - DNA, 1690 bp, Homo sapiens
atgtgtaacttaataagcctattccatcacaatcatgatcgctggtaaagtagctcagtggtgtggggaaacgttcccctggatcatactccagaattctgctctcagcaattgcagttaagtaagttacactacagttctcacaagagcctgtgaggggatgtcaggtgcatcattacattgggtgtctcttttcctagatttatgcttttgggatacagacctatgtttacaatataataaatattattgctatcttttaaagatataataataggatgtaaacttgaccacaactactgtttttttgaaatacatgattcatggtttacatgtgtcaaggtgaaatctgagttggcttttacagatagttgactttctatcttttggcattctttggtgtgtagaattactgtaatacttctgcaatcaactgaaaactagagcctttaaatgatttcaattccacagaaagaaagtgagcttgaacataggatgagctttagaaagaaaattgatcaagcagatgtttaattggaattgattattagatcctactttgtggatttagtccctgggattcagtctgtagaaatgtctaatagttctctatagtccttgttcctggtgaaccacagttagggtgttttgtttattttattgttcttgctattgttgatattctatgtagttgagctctgtaaaaggaaattgtattttatgttttagtaattgttgccaactttttaaattaattttcattatttttgagccaaattgaaatgtgcacctcctgtgccttttttctccttagaaaatctaattacttggaacaagttcagatttcactggtcagtcattttcatcttgttttcttcttgctaagtcttaccatgtacctgctttggcaatcattgcaactctgagattataaaatgccttagagaatatactaactaataagatctttttttcagaaacagaaaatagttccttgagtacttccttcttgcatttctgcctatgtttttgaagttgttgctgtttgcctgcaataggctataaggaatagcaggagaaattttactgaagtgctgttttcctaggtgctactttggcagagctaagttatcttttgttttcttaatgcgtttggaccattttgctggctataaaataactgattaatataattctaacacaatgttgacattgtagttacacaaacacaaataaatattttatttaaaattctggaagtaatataaaagggaaaatatatttataagaaagggataaaggtaatagagcccttctgccccccacccaccaaatttacacaacaaaatgacatgttcgaatgtgaaaggtcataatagctttcccatcatgaatcagaaagatgtggacagcttgatgttttagacaaccactgaactagatgactgttgtactgtagctcagtcatttaaaaaatatataaatactaccttgtagtgtcccatactgtgttttttacatggtagattcttatttaagtgctaactggttattttctttggctggtttattgtactgttatacagaatgtaagttgtacagtgaaataagttattaaagcatgtgtaaacattgttatatatcttttctcctaaatggagaattttgaataaaatatatttgaaatttt

SEQ ID NO: 16444 - DNA, 1080 bp, Homo sapiens
gaatttttcttttcataaaagctggatgaagcagataccatcttatgctcacctatgacaagatttggaagaaagaaaataacagactgtctacttagattgttctagggacattacgtatttgaactgttgcttaaatttgtgttatttttcactcattatatttctatatatatttggtgttattccatttgctatttaaagaaaccgagtttccatcccagacaagaaatcatggccccttgcttgattctggtttcttgttttacttctcattaaagctaacagaatcctttcatattaagttgtactgtagatgaacttaagttatttaggcgtagaacaaaattattcatatttatactgatctttttccatccagcagtggagtttagtacttaagagtttgtgcccttaaaccagactccctggattaatgctgtgtacccgtgggcaaggtgcctgaattctctatacacctatttcctcatctgtaaaatggcaataatagtaatagtacctaatgtgtagggttgttataagcattgagtaagataaataatataaagcacttagaacagtgcctggaacataaaaacacttaataatagctcatagctaacatttcctatttacatttcttctagaaatagccagtatttgttgagtgcctacatgttagttcctttactagttgctttacatgtattatcttatattctgttttaaagtttcttcacagttacagattttcatgaaattttacttttaataaaagagaagtaaaagtataaagtattcacttttatgttcacagtcttttcctttaggctcatgatggagtatcagaggcatgagtgtgtttaacctaagagccttaatggcttgaatcagaagcactttagtcctgtatctgttcagtgtcagcctttcatacatcattttaaatcccatttgactttaagtaagtcacttaatctctctacatgtcaatttcttcagctataaaatgatggtatttcaataaataaatacattaattaaatgatattatactgactaattgggctgttttaaggc

SEQ ID NO: 16445 - DNA, 321 bp, Homo sapiens
aggcccacccctcacattactgtctctttgtcaatgtgggtaatcagtaagacagtatggcacagtaaattactagattaagaggcagccatgtgcagctgcccctgtatcaaaagcagggtctatggaagcaggaggacttccaatggagactctccatcgaaaggcaggcaggcaggcatgtgtcagagcccttcacacagtgggatactaagtgtttgcgttgcaaatattggcgttctggggatctcagtaatgaacctgaatatttggctcacactcacggacaattattcagcattttctaccactgcaaaaaac

SEQ ID NO: 16446 - DNA, 1819 bp, Homo sapiens
tatcaggtcctcaatcttcagctacagggaatgagtaactttgagtggagaagaaacaaacatagtgggtataatcatggatcgcttgtacccctgtgaaaatatattttttaaaaatatctttagcagtttgtactatattatatatgcaaagcacaaatgagtgaatcacagcactgagtattttgtaggccaacagagctcatagtacttgggaaaaattaaaaagcctcatttctagccttctttttagagtcaactgccaacaaacacacagtaatcactctgtacacactgggatagatgaatgaatggaatgttgggaatttttatctccctttgtctccttaacctactgtaaactggcttttgcccttaacaatctactgaaattgttcttttgaaggttaccagtgactctggttgccaaatccactgggcacttcttaaccttctatttgacctctgcgcatttggccctgttgagcactcttcttgaagctctccctgggcttctctctcttctagttctattctagtctttttttattgagtcctcctctttgctgatcccttccaagggttcaatatatatacatgtatatactgtacatatgtatatgtaactaatatacatacatacaggtatgtatatgtaatggttatatgtactcatgttcctggtgtagcaacgtgtggtatggctacacagagaacatgagaacataaagccatttttatgcttactactaaaagctgtccactgtagagttgctgtatgtagcaatgtgtatccactctacagtggtcagcttttagtagagagcataaaaatgataaaatacttcttgaaaacttagtttactatacatcttgccctattaatatgttctcttaacgtgtgccattgttctctttgaccattttcctataatgatgttgatgttcaacacctggactgaatgtctgttctcagatcccttggatgttacagatgaggcagtctgactgtcctttctacttgaaagattagaatatgtatccaaatggcattcacgtgtcacttagcaaggtttgctgatgcttcaaagagcttagtttgcggtttcctggacgtggaaacaagtatctgagttccctggagatcaacgggatgaggtgttacagctgcctccctcttcatgcaatctggtgagcagtggtgcaggcggggagccagagaaacttgccagttatataacttctctttggcttttcttcatctgtaaaacaaggataatactgaactgtaagggttagtggagagtttttaattaaaagaatgtgtgaaaagtacatgacacagtagttgcttgataatagttactagtagtagtattcttactaagacccaatacaaatggattatttaaaccaagtttatgagttggttttttttcattttctatttgtattttattaagagtgtcttttcttatgtgattttttttaattgctatttgatatggtttggctatatgtccccacccaaatctcatcttgaattataatccccatgtgtcaagggagggacctgacgggaggtgattggatcacgggggcagttgtccccatgctgttcttgggatagtgagttagttctcatgagatctgatggttttataagtgtttgacaattcctcctttacacacactctctctctcatctgctgccatgtaagacttgcctgcttccccttctgccatgattgtaagtttcctgaggcctcctcagccatgtggaactgtgaatctattaagcctcttttctttataaatg

SEQ ID NO: 16447 - DNA, 842 bp, Homo sapiens
aactgccaaagcatttcattgagaattatgatgttataaaaaggaaaaaggaagaatgtcgtctactgcagtctatttaaagatgacatttggtgaaaactctcttcctccttacaatattttaaatgattttttttttggtgttaatttgtaaaaatcattatttgttcaaaatgtatgtcccaccctcaaagatatgcacttttaagtgaagaaaatgatactgctagcagcttatttaaaacttggggtcctttttaaataagaaaaattatataaattttagaagttatttcataaagccatacggtattgacatatttttaaggtagtcaatgagtatttttgaattttttttttttgagagttattctggaaatgtgttataagctaggagaatccctttggacagtctttatttttcttcttaaaaatttatatgattcaaaaccatttcttcaggttaaattgaggcattttaatctgcacagtttatcttctgccaaaataaaaatttactatttcctttatatacttgtttatctggactgccagtaaaacaaatgtgtattcaacaaaagaaaaaaaataaaacagtaacactttaaaacaagaatcagacattttcctatgcagtatttttttttaaagtttattttagtaaagttaaaatcttgaaagtagctaagggcataattatgtcataaatactgaacttcaggtgaacaaatactttatagttttaattattttctttgattttgaggagtatcttatttgctttctatcatcagtaaaaacagcatttaacttgctaaataaacatgaaaaacccttgtcat

SEQ ID NO: 16448 - DNA, 351 bp, Homo sapiens
agattatgtaaaaagttaaaaggcttatgagcctaagtttgttcctatattaccatatttactgaattttctggaaaagtaactttaataaagtttaatctcagaaattgtcatatctgttttcaagcattgtacaatttgagactgagtaatttaacaataagtaaaaagtggacatgctaaacaaatatgagagactacctactttttctggtcattcttgacttggaaaacggtatggaaaagtatttagttacatgtttgtttgtttttttcttacacagtacttacactaatttggtatcagggtatgcaacagtgaaatatcacaataaacaaatgtaagaacag

SEQ ID NO: 16449 - DNA, 645 bp, Homo sapiens
agaaagcatgatgtcccatgagggagacggtggggaggcttcccatgatttggaggatagcaacatcagttatgggagctgtgaggagcctgatcccaagttgaacacccaagacacaagcttcagcagcatcggaaatttccagctgggcatggtggctcacacctgtaatctcagcactctgggaggccgaggcgggtggatcacctgaggtcagttcgagaccagcttggccaacatgtcgaaacttcatctctactaaaaatacaaaaattagccaggtgtggtggtgcacgcctgtaatccccagatactcgggaggctgaagcaggagaattgcttgaacccgggaggcagaggttgcagtgagtggagatcacgccactgcgctccagcctgggcgaaagagtgagactccatctcaaaaaaaaagaaaatttccaagcatggtatcatctcacttttctaatttacaggctggaacagatgagagccctcctgctgggacagagaattgggttctagtggactctgctacacttaaacctatgtgacaaaccgcccattattttattgtttatttaattatacaatgcctcgttcctatatggatttgaggcaaattaccataaattttgaaacagc

SEQ ID NO: 16450 - DNA, 1073 bp, Homo sapiens
ctgggatttgacttttcttccttgcctgcagctgtgatcgagatggtacaagaggctggtagagtaactgtccgagatgggatgcctgagctcttgaagctgccccttcgttgtcatgagtgccagcagctgctgccttccattcctcagctgaaagaacatctcaggaagcactggacacagtgattctgcagagcctgagctgctgctgtggtgtggcccactggagcaaactgctggcacctattctgggttgcttgtgaacttctactcatttcctaaattaaaacatgcagctttttcacaaatttattctattattgagtggccacaatgtagagtggctcaaagtacttcaggattaggaatttgggtttgtcatagatgtattctctggtgagggtggctgggatatacctgacccaccatcttcagaaggacccatgtcaggtctgaccattgggagcaaagccatgttcacactgacctaatgcagagtatggaagcattgggctggttatacatttctgtttcttagatttatcctccgcctctgtaggcatggacaacctttaatcagagcatctagagtggcctcttgtttatcctgaagatactgatgggtcttgttttctgttagtctgttttgtaatattcttttcccttccttcatggggaggcttagtttgtccagtccttccatgcccttctatcccagattacctaaatgttcccttctcaggaattctgtctcatcagttcttcacagtgagaaaagaggctagatgatggtgtggggggttggagttttcttctaataccgagggttcctggctgtgaggaaacagccacatgttcgtcatgattgagctgtgaagtcttcttggacctgttgtctgaaaataaagttaatttgtttgaggcatctctcttaagtaggtggaaactattgaagttcagctaacaatcacagcataggttctgatgcatggaaaggtggttggtgaatgaaaaagttgcgtagagccactactttctttttccctgagaataaatttggataaaacagttgt

SEQ ID NO: 16451 - DNA, 5441 bp, Homo sapiens
ttcaacttttctttttaaatcagctcgaaagcatgtacttaaatgaagcatattcatgtaatgtgcttttttttttttttgccagcttttctaagcaaatagattgtctgaattagtcacagaataattttgtgaaaattcatgtttaagtagcaactaccctttctttttttatatatttttaaggtattagtttatcttcttctaactggtgcagtcacttaatgttttcattaatcttcgacctggagagtgaaatactgatatttctagaaaaaaattctactcctctgattatttgaaatgctgaggaaaatgtccctcccatagtaaaacttgtaaataaggaactatatcatattcagtagctgtgttctgttccatctttttttttttttttgagatggagttttgcttgttgcccaggctggagtgcagcggcacgatcttggttcactgcaacctccgcctcccaggttcaagcgattctcttgcctcagcctcccgagtagctggggactacaggtgtgcgacaccatgcctggctaatttttttgtatttttagtagagatggggtttcaccatgttggccaggctggtctcaaactcctgacctcaaaggatccacccgccttggcctcccaaagtgctgggatcacaggcgtgagccaccatgcccggcccatctttttttttttttttttttttaaagatgttaataaactttatacctttctggagactttgttctaaaatgtacataaatgctcatctagttaacatatttacttagaatgtgggaggaggagtcacattattatccctgaatctcaagtacagcagaagtgaattcctgggatagtaggatagactaacatgtaaaaaggccaggtgatgcataggttctcatttcactgccctcagccttcctctccttctgagctgtgccttctcacatgttcagtcaactccagggaatattgtctccatcttctggatagaactagttgcaggatccgttacaagaattcagagttttggcatctcccctttgtatgttgtaggagaaggtttggcattgaaaatgtgctgttgttccaaagaaaaattagcaaaggacttgagatttagaaaagtctcctttgtaatgtgcatcattaccagttatctaaagaaaaacatgtaaaagccaacaaaacccttgaaaatattttgcatatggatgtctgtttcacgtttcaactgaagatgtatagagcacctctgatgatgaggaagataccatgctaggcagtactttcaagaacgtgagttcttatttctgcaggccttttgtgcccccttttaaatgttagcatttattaggtacaaactagtggggaaggtttttttaaaaagttttgcagtcttgtaatttacctttttaaaaaatttattttatttttctgagatggagtcttgctctgttgcccaggctggagtgcagtggtgccatctcagctaactgcaacttccacttcccaggttcaagcgattctcctgccttagcctcccaagtagctgggactacaggcgcatgccagcatgcctggctaatttttgtatttttagtagagcgggggttttgccatgttggccaggctggtcttgaactcctgacctcaggtgatccgcctgccctggcctcccaaagtgctgggattacaggcatgagccactgcgcccagccttgtaatttacctttgatggtgacctgaaatgcagtatgatcctatatgtggcacgtagtaatgttcagtgtttgctgaattaattctgggcagcactaagaaatccctctttcccagtcatattctataacacatttcccatttgccacaaaacctgcagctttttggtccaggtaatgacatttgctgccattttgatgatttaaaaatggtcgtgggagttgaacatagtcatgaattcaggattcctgagcatgtagacagtcatcccagtggaaagacacgttcacttaagagaagtttaagttagaggaaacagtttatgctaaaaaaatttttagaaaagtccttgagaatttttgatttagtcttgacctcatgaagctggtagttatgatgtgcatagtttgtatcaccgtttatgaagatggagaatctagtcagcacgtgttggtttattctaggaatttttagggaacacttctgttgctggcaccaggtgatgaatatggttaaaaaaagactcgtttctgcctaaacatagggaagaagagcaaattaaaaggagtaattaaaactgataaaagctcaagttacctttgtgatgatgaggcgggcagttaacgcgaaagggttgggaaaggcttcctggagggactagggggcggtctaagcacagggaacctaaccggggactccagtgtggcacagcggcaaggtatgtgctgggcaaaatgataggtgtcttgggagaccaggcaaagagagctggattaggagccgttaagtatatatttttcttctttttaaataaaataatgcactgggtgaacatgtaaacgctaagttgaaaatctgcctttcccaggtaacccttgttaatctttctacaacttcatttcgtacaaacctgaaaaacacactgattttgtctttaaatgggcacacgctgcttacactcctcggcgcctagcctttctgaagccccacgcggccgtccctccagcattgaaggctggggcagcccagctcccctccagcgcccttacagccagaccgcggcggggtcgggccgcgcacgcgcagggcggacggccggatctggggcgccgctgctccgggtggtcggaggtaggagtcccatcttgggtccagggccggtagagccccttaccgggggtagggagactgcgcacccgctagagccaactgtcagggcctgcagacgtcgggtgacgtcactgttacaaaattggcggtcacatcgtcttaagggccggtggcagcggctgcgcgaacgggagttggctgccgggaatcagtgctcacttccttctgaattgggcgtgtgcagtcggttcctagggaagtgctctgctgcagccaccagatttaacggatgctgctctctagcacttaacatagaagctaaactacctggcgttaaaattaattccatgagcataaggacatttgtcctatcccctattctgctgttgaattaatgactggaaaacattgcgcggaggtatttgggagtagtatggctttttttttttttttttttttaacagcaaatggtataaatctcaggtacaattcagtatcttcttcaccagttgttttttttcagcatgtattattactaccactaacggcctctgttgagcccttccttgctatgtaagcagccatatttaattctcagaacaatgtaatgagggtgcgcaaatgcacatgaagaaacaggtttccagacgtgaggcacctaactcagtccaacttgcacgaagctcgcattgaaaaccagatgtgactccgaagctaggttttttttctctcttgcctcactctcaatattgctgtcagttcctcctcaatctttaggtttgggcagggacaaagaatacatggattgttcctccacatgctgcaaacacattcacctaagcagagcacaggtagtgagatgagtagagagaactgaattagaggattctggatgtcagtctttgctgtcacttcttttggcttgtgctagaacagtggttcttacaagtgtcacgtgatagacacattctaaggtcctatcccagacctacagaatcagaaattggtggtggggcccagcaagcgtgctcaaatttgagagcaggtagactacagggtagtttccgcatatacaaaaggtgttttaattcttgctgtcagtctcagaagtttcatgctgagataaccaaatttaaatgataaaggtgcaagactgactcttaaaatcacattttttcaaattgccatagcttgctagtgttctcattcactgtgcttttacagcttcattttccactattttaagagaagaaattgctatgaagtgtatgtccaagtgaggaagttccctggtctgaggttgtttaaaacttacaataggccgggcacggtggctcaagcctgtaatcccagcactttgggaggccgaggtgggtggatcacgaggtcaggagttcaagaccaccctggccaacatggtgacaccctgtctctactaaggatacaaaattagccgggcatggtggcacacgcctgtagtcccagctacctaggaggctgaggcaggagaatagctggaacccgggaggcagaggttgcagtgagctgagactgtgccactgcactccagcctgggtgacagagcaagacttggtctcaaaaacaaaaaacaaaaaaaccaaacttggaatagcaagggctgcccattatttaaccttccacggcaattttaacagtggtattctgttccaagtggttaatattaaatccatgtgtcagtgttggtggctttcaaccttggctgcgcataatcattttgatgcttaggctacacccagccgagttatacagaatccctggagggtgggacctgatgagtgttttaatgtttcccgggtaattccaatggtagccaaggttaagaaccagtaccgtacgtacaaaaaagttgagaagctaatttcacgtacagaaaatttgccactgttccaagagcactctcaagcgacataattggcctctactcctattccctacaagtatgaatgggcaggagaagcatcacagagaaagcagagttagtgctggaacttgtatttttgtggatgatgaccttggttaatgttttttcataggctctgtttcataggctttgttttttcataggctctccctcattacattgttctgagaattaaatatggctgcttacatagtaatgaagggttcaacagaggctgttagtggtagtaataatacaagctgaaaaactacacagacaaacctatcagtttctgcctcttcaggatataactattaggttagtgcaaaagtaattgcggtttttgccattaaaagtaatggcacattacttttgcaccaaccgacctaatatgactttcttttagtgttcttaggatttttaattgtaaaacatgtaacaaattttcctaaacaattgtgcaattcagtggcattatttacgatgttacgcaaccactattgtatttccaaaatgtcatcaccctaaacagaagccctgtaacattgtcaattaacttctccttcccttcccctcagcctttggtactgtttctgcctcaatgcatttgtctaagtttagttcatataagtgaaattatacaatacttgtccttttt

SEQ ID NO: 16452 - DNA, 2810 bp, Homo sapiens
cgttttggtacacggataagagacctgaaattagccagggacctctgctgtgtgtctctgccaatctgctgggctggtccctctcatttttaccagtctgagtgacaggtccccttcgctcatcattcagatggctttccagatgaccaggacgagtgggatattttgcccccaacttggctcggcatgtgaattcttagctctgcaaggtgtttatgcctttgcgggtttcttgatgtgttcgcagtgtcaccccagagtcagaactgtacacatcccaaaatttggtggccgtggaacacattcccggtgatagaattgctaaattgtcgtgaaataggttagaatttttctttaaattatggttttcttattcgtgaaaattcggagagtgctgctaaaattggattggtgtgatctttttggtagttgtaatttaacagaaaaacacaaaatttcaaccattcttaatgttacgtcctccccccacccccttctttcagtggtatgcaaccactgcaatcactgtgcatatgtcttttcttagcaaaaggattttaaaacttgagccctggaccttttgtcctatgtgtgtggattccagggcaactctagcatcagagcaaaagccttgggtttctcgcattcagtggcctatctccagattgtctgatttctgaatgtaaagttgttgtgtttttttttaaatagtagtttgtagtattttaaagaaagaacagatcgagttctaattatgatctagcttgattttgtgttgatccaaatttgcatagctgtttaatgttaagtcatgacaatttatttttcttggcatgctatgtaaacttgaatttcctatgtatttttattgtggtgttttaaatatggggaggggtattgagcattttttagggagaaaaataaatatatgctgtagtggccacaaataggcctatgatttagctggcaggccaggttttctcaagagcaaaatcaccctctggccccttggcaggtaaggcctcccggtcagcattatcctgccagacctcggggaggatacctgggagacagaagcctctgcacctactgtgcagaactctccacttccccaaccctccccaggtgggcagggcggagggagcctcagcctccttagactgacccctcaggcccctaggctggggggttgtaaataacagcagtcaggttgtttaccagccctttgcacctccccaggcagagggagcctctgttctggtgggggccacctccctcagaggctctgctagccacactccgtggcccaccctttgttaccagttcttcctccttcctcttttcccctgcctttctcattccttccttcgtctccctttttgttcctttgcctcttgcctgtcccctaaaacttgactgtggcactcagggtcaaacagactatccattccccagcatgaatgtgccttttaattagtgatctagaaagaagttcagccgaacccacaccccaactccctcccaagaacttcggtgcctaaagcctcctgttccacctcaggttttcacaggtgctcccaccccagttgaggctcccacccacagggctgtctgtcacaaacccacctctgttgggagctattgagccacctgggatgagatgacacaaggcactcctaccactgagcgcctttgccaggtccagcctgggctcaggttccaagactcagctgcctaatcccagggttgagccttgtgctcgtggcggaccccaaaccactgccctcctgggtaccagccctcagtgtggaggctgagctggtgcctggccccagtcttatctgtgcctttactgctttgcgcatctcagatgctaacttggttctttttccagaagcctttgtattggttaaaaattattttccattgcagaagcagctggactatgcaaaaagtatttctctgtcagttccccactctataccaaggatattattaaaactagaaatgactgcattgagagggagttgtgggaaataagaagaatgaaagcctctctttctgtccgcagatcctgacttttccaaagtgccttaaaagaaatcagacaaatgccctgagtggtaacttctgtgttattttactcttaaaaccaaactctaccttttcttgttgttttttttttttttttttttttttttttggttaccttctcattcatgtcaagtatgtggttcattcttagaaccaagggaaatactgctccccccatttgctgacgtagtgctctcatgggctcacctgggcccaaggcacagccagggcacagttaggcctggatgtttgcctggtccgtgagatgccgcgggtcctgtttccttactggggatttcagggctgggggttcagggagcatttccttttcctgggagttatgaccgcgaagttgtcatgtgccgtgcccttttctgtttctgtgtatcctattgctggtgactctgtgtgaactggcctttgggaaagatcagagagggcagaggtggcacaggacagtaaaggagatgctgtgctggccttcagcctggacagggtctctgctgactgccaggggcgggggctctgcatagccaggatgacggctttcatgtcccagagacctgttgtgctgtgtattttgatttcctgtgtatgcaaatgtgtgtatttaccattgtgtagggggctgtgtctgatcttggtgttcaaaacagaactgtatttttgcctttaaaattaaataatataacgtgaataaatgaccctatctttgt

SEQ ID NO: 16453 - DNA, 2747 bp, Homo sapiens
ggtgtagcagaaaaaggctgtgctgccctgaagaatggcgccaccagctctgccgtctctggagcggaatttacctgatttcttcagggctgctgggggcaactggccatttgccaattttcctactctcacactggttctcaatgaaaaatagtgtctttgtgattttgagtaaagctcctatctgttttctccttctgtctctgtggttgtactgtccagcaatccaccttttctggagagggccacctctgcccaaattttcccagctgtttggacctctgggtgctttctttgggctggtgagagctctaatttgccttgggccagtttcaggtttataggccccctcagtcttcagatacatgagggcttctttgctcttgtgatcgtgtagtcccatagctgtaaaaccagaatcaccaggaggttgcacctagtcaggaatattgggaatggcctagaacaaggtgtttggcacataagtagaccacttatccctcattgtgacctaattccagagcatctggctgggttgttgggttctagactttgtcctcacctcccagtgaccctgactagccacaggccatgagataccagggggccgttccttggatggagcctgtggttgatgcaaggcttccttgtccccaagcaagtcttcagaaggttagaacccagtgttgactgagtctgtgcttgaaaccaggccagagccatggattaggaagggcaaagagaaggcaccagaatgagtaaagcaggcaggtggtgaagccaaccataaacttctcaggagtgacatgtgcttccttcaaaggcatttttgttaaccatatccttctgagttctatgtttccttcacagctgttctatccattttgtggactgtcccccacccccaccccatcattgtttttaaaaaattaaggcctggcgcagcagctcatgcctataatcccagcactttgggaggctgaggcgggcggatcacttgaggccaggagtttgagaccagcccaggcaacatagcaaaaccccattctgctttaaaaaaaaaaaaaaaaaaaattagcttggcgtagtggcatgtgcctataatcccagctactggggaggctgaggcacaagaatcatttgaacctgggaggtagaggttgctgtgagccgagattacgcccctgcactccagcctgggtcacagagtgagactccatctcagaaaaaaaaaaaattgagtcaggtgcagtagctccttcctgtagtcccagctacttgggaggctgaggctagaggatcacttgagcccaggagtttgagtctagtctgggcaacatagcaagaccccatctctaaaatttaagtaagtaaaagtagataaataaaaagaaaaaaaaactgtttatgtgctcatcataaagtagaagagtggtttgcttttttttttttttttggattaatgaggaaatcattctgtggctctagtcataatttatgcttaataacattgatagtagccctttgcgctataactctacctaaagactcacatcatttggcagagagagagtcgttgaagtcccaggaattcaggactgggcaggttaagacctcagacaaggtagtagaggtagacttgtggacaaggctcgggtcccagcccaccgcaccccaactttaatcagagtggttcactattgatctatttttgtgtgatagctgtgtggcgtgggccacaacatttaatgagaagttactgtgcaccaaactgccgaacaccattctaaactattcatatatattagtcatttaattcttacataacttgagaggtagacagatatccttattttagagatgaggaaaccaagagaacttaggtcattagcgcaaggttgtagagtaagcggcaaagccaagacacaaagctgggtggtttggtttcagagccagtgcttttcccctctactgtactgcctctcaaccaacacagggttgcacaggcccattctctgatttttttcctcttgtcctctgcctctccctctagctcccacttcctctctgctctagttcattttctttagagcagcccgagtgatcatgaagtgcaaatcttgccatgtcagtcccctgcttagaaccctccaatggctcactttctctttaggcaaaagtctttaccccatgccttctcccatctcatctcaaccccctcatttgttggctgtctgctgtcagccactcttctttcaggtcctcagatgcactgcaccctctcctgcctgggggtctttgctcctgctactacctctgcttgaacagctcctcaccttccttcctccaaccctacccttgtataggtgacttttgttcatccttcagaattcaactcacatgtctcttgcatggagaaccctcacctactgtgttgagaccctgtccagcccccaggtgggatcctctctcgacttcccatacatttctttcacagcatttacatagtccatgatagtttacttgtgggattatttggttaatctttgcctttaacaccagggttccttgggtgaaggagcttctttatcttggtaacagcattatttcaagcataacttgtaatatagttatattacatatataacatatatatatataacataacatatataacatatataacaagcataacttgttatatagtcttgtatatagtaagacctcaataaatatttggagaacaa

SEQ ID NO: 16454 - DNA, 54 bp, Homo sapiens
gcagagattatttgtgatcccatccattccccaataaagcaaggcttgtccgac

SEQ ID NO: 16455 - DNA, 879 bp, Homo sapiens
gtgggcaggggccatctccccactccgctgccctggccttgagcatccactgactgtccaagggccactcccaagaagcccccttcacgatccaccctttcaggctaaggagctccctatctaccctcaccccacgagacagccccttcaggatttccactggaccttgcccaaatagcaccttaggccactgcccctaagctggggtggaaccggaatttgggtcaatacatccttttgtctcccaagggaagagaatgggcagcaggtatgtgtgtgtgtgcatgtgtgtgcatgtgtgtgcatgtgtgtgcaggggtgtgtgtgtgtggggggggttcccagatattcagggcaagggaccagtcggaagggattctggctattgggggagcccagagacaggggaaggcagcctgtccatctgtgcataaggagaggaaagttccagggtgtgtatgtttcaggggcttcacatggaggagctgcagatagatatgtgtttctgtgtatgtgtatgtctgcctttttttctaagtgggggcttctacaggcttttgggaagtagggtggatgtgggtagggctgggaggagggggccacagcttaggtttggagctctggatgtacatacataagtaggagcagtgggacgtgtttctgtcataatgcaggcatgaagggtggagtgaagtcaggtcataagtttcatgtttgcttttgttttgttttgtttttaatgtatgtagcagatgttacagtcttagggatccgggatgggagaccccactttagaaagggtcgtcactcctttaatcctctactcaacaatgtactcttttacttttatattaaaaaaaataaaataaatatgtgcct

SEQ ID NO: 16456 - DNA, 1310 bp, Homo sapiens
tcccagctctggagcaagctgtagacggacagcaggacattggacctctagagcaagatgtcagtaggatgacctccaccctccttggacatgaatcctccatggagggcctgctggctgaacatgctgaatcatctccaacaaaacccagccccaactttctctctgatgctccagcattggggcaggggcatggtggcccatgtagtctcctgggcctcaccatcccagaagaggagtgggagccagctcagagaaggaactgaacccaggagatccatccacctattagccctgggcctggacctccctgcgatttcccactcctttcttagtcttcttccagaaacagagaaggggatgtgtgcctgggagaggctctgtctccttcctgctgccaggacctgtgcctagacttagcatgcccttcactgcagtgtcaggcctttagatgggacccagcgaaaatgtggcccttctgagtcacatcaccgacactgagcagtggaaaggggctatatgtgtatgaatagaccacattgaaggagcacaatgccctcctgtgttgatgccacttcccagggtggagacagtggaaaagaaccgaggacaggaaaggattgggtaggtgaaggggtcaggggactggtagtcacccaatcttggagaggtgcaaaaagcactgggggctacccgttagctgcatctgccctggctgtttgcccgttcatgtcacaaactgccactactatgtacctgcagtggggttgcagagatgggggagactcaagtcttactccccaggagctcccagggcccaaggaggagaatgctgcctcctttcagtctggtctacacccactttctggtagcctctctgcttcctgtaattctggctgtttttccagactcagctcaaatagtgcccctccttaagcccatccctcgcccccagcctgaggtgatctttccctcctctgaactattagagcagttactgtctgttcagttcgtttggcaggcacacacagtggcataaattctattgttttgaactctgatttaaaattaaattgcagctgggcgtggtggcttatgcttgtaatcccaacacttagggagtcaggagaatcacttgagctcaggagttctagaccaatctgggcaacagagagaccccatctcttttaaataaaaagttaaattgcttaatttcccccgtattcctggcctgtctgcccctttcacataattttaacctggtttcttgtatgtaaactccttgagggcaagaacatgtttgaacatag

SEQ ID NO: 16457 - DNA, 811 bp, Homo sapiens
acccagaagagaggggtgggctggggcaaggcttatcctgggcaggagagaacacacgagcacgtatttgggagcccagtgccctttcctagaattcccgacatgtgtcagccatgcctctgtggggagtctgcctcccagactggctactgtatgtaatgtatttatgtatgtatttgtaaatgtgatagaagtctgggggggagttgggggatggcggcagatgttagccaggtctgccctccccattcaagccccttctccactgtagcaaaataagcacccccaccccatctgccttcaggtcttcttcacagcctgcactgcccagtgggccactaggggcagtctctggaagggctggttcaaggctgtttgggtataggggtcaggtaccaatgaagaatcacgacttgtctcactcctttggaaattgttttctttcctgtgtaattacttcatacctctgtttttgagaaactgttccgtttgtcatctgtcatggtctccttccaccaaatcttcatctgggaatagcagcggtatccctccacccaagtatggccacctgtttgtcttcatatagaacaggggcttctggtctggtcatgtccctagagacttactagagactggctgaccatgaaaaaaaaaaaaataatctgagttattcagccagtcagctcccctttaaaaatctaaggtatctccaagcaacacatctccattctagttgtcttgaaccacgtgggcaactgtttcaggggttttctcttgcccaatccccacctaataaagttctgagagcatg

SEQ ID NO: 16458 - DNA, 1962 bp, Homo sapiens
tgacaactccccaaatgcagagatttacactaacttccattctcagtttccttgtttcttttgattttttttttcctaattgtgtgaggctcttgtgttttagtgggaacaccaaagtttgcctatagtttaggcacttaataggaagaagctctgtacagaaatctgaaagttgttttgctttttgttttcccctttggtaatcaaaattttactatcttttattatttctggcttttcaaccaaacattgttgctaatccctatttttctttaagtgacacacattctcctgtctctggcttcttcaggctgaaatgacatagctcacccttacttcactcttgagaggtagggctcctttataattacatggttgctctcagactttctgtgaaagtttgggagctgtgtgtgtctgtgtgtgtgtgagagagagatcttgtctgcgtgtgtgtgtgtgatcttgtgtgcctgtaggtactgtgtgtcactgaaattacctggagtgaggattacttgtaattaaaatatttataaaagaaacaactttattcacagagtccagctttgggactagtctgtatcttgttttttaagtctaacaacactgataataggaagtaaaaacagaaaggaaaagaaattaccactgggaaaatctttttagttagattgtaggcttcctggggcctcccatgccaggactgcaaagtgatccagccctacctgtcttcccacctgtgtgtcccccgtgtgggaagttggtgtcacttccccttcccaccctcacatctgcttagccagtagccacacccctaaaacatcagactcaccatccaggtgcagctccagaggctacaaaaggcttcatgggacttgaatccccatcctagcttctctctccttcccctcaagacctgatctggttttaaggggcctggagctgggagtctcaagtctgctaagattcacatccatagcccccatggctttgaggagaatcctctctgccattcttccaatctccccagtgggttttgctattattttctaaattgggttaagtctaagaaggtgggggtgagcagggggtttatctgtgtgtagtgagtgcttcatgtgtggaatattcattttcttactgcagtgggacttggggttgaagccacccctcctactctgttggcttagccctgagatggtgacaggctggcctgcagtcagcatcattgtgcatgtgacagcatcaatgtgattagtaatttgtctgttcctcccttgaactgtctgtttagtctgaggtttttaaacttgcaggcagctgactgtgatgtccacttgttccctgatttttacacatcatgtcaaagataacagctgttcccacccaccagttcctctaagcacatactctgcttttctgtcaacatcccattttggggaaaggaaaagtcatatttattcctgcaccccagttttttaacttgttctcccagttgtccccctcttctctgggtgtaagaagggaaattggaaaaaaaattatatatatattctccttttaatggtggggggctactggagaggagagacagcaagtccaccctaacttgttacacagcacataccacaggttctggaattctcatcttcgaacctagagaaataggtgctataaacagggaattaagcaaaatgctggatgctatagatcttttaattgtcttaattttttttctattattaaactacaggctgtagatttcttagttctcacagaacttctatcattttaaactgacttgtatatttaaaaaaaaaatcttcagtaggatgttttgtactattgctagaccctcttctgtaatgggtaatgcgtttgattgtttgagattttctgtttttaaaaatgtagcacttgactttttgccaaggaaaaaaataaaaattattccagtgc

SEQ ID NO: 16459 - DNA, 2000 bp, Homo sapiens
agccagaccctgtgccgagatggtgggggccctgcaggagtctgtgctgggctctcaggctggaggagcctctgccaggtcctccctgcacacaccagaacccacacgctggtcctgcctatgctagcgtcaccccagccccacgtggcttcagataggtcccagcttctccctcagggacaggcccctgtccctcagttccatgcacaggagtgcctccaagggtgggccaggccgaagaacctaatgcctttcccttgtgcctagagaatatgattaactaaccccttgcctgtgggaatatatttgggtctaataaccctgaagtttctaagtttggggatcagaggatggggtggtcagtggtagcctagaggtcagaggtcacaagacagagaagacaacatgctgagaccagaggcttcaccagctgaattctgtgcctaacttagaagactaaacactggcccaaacttaaccattggtgctagggggacaggggtggggtgagctctgccccatcagcccttggagattgatttggggatttagaggcgtttttgaaaatgtaaatagcataaaccttgacttgatgtgtcactgacagcagcagatgtgagacaggccttatatttacagctcccttcccttcctgcaatccagtgttgaggcagaagagggtgcctgtgtcacacatcaatttttctcctgacttttgctcgggtgaaaggcctctgtacaatgcccgatactctcatgcttccatggcagctcctggctcctatctgggacacctcactacccagccccctcatggaatagtccatctcctagcctggccttcatccagttcaccctgcccagccaccctgcctctcaggggtctgtgttgggaaccttggcagttgaacagagtgctctgttcaacagtctgaggcctctgaaacagaattcacacacaaaccttcagccaagttctgcctgctgtgtatctttttagcaggaagcagctcaggacagggaagacaaagtagcctccaggtgccaattactttaaagccactctgggtcaaatggagattcatgagtcacggccttggcccgaacgcccattactatgtgagcctttatttccttcagataaaggataactttttacggttttaaaaggagggcttaattaaaaggccaagaagagggttaaatggctctcttgagacactagcagcctggtccagtcaccctttgtcagcctgacagtgcctcatctgaccgccagggggcatccttattggtgcttcccggctgcagggcactgcggcccctccctcacatgatcactaaaaaccttcaaagacccagtctagccaaaagctcaagtgggacaatggcacagtattaaggtcaaggacaaaaacttacttactttaggaatgaaccctattctatcatcatatacaacagcaccactgagagctggtgaaacagtttaaatcccatcctctgcttgtggcaaatgatgcataaatgcctgctgctcacagtaaaagggcttcttcctcttttactgggtgatccccctgaaggcccagcctatcccaactccacagtcaggaaggcctacgtccttggtccacagacggagctgggccaggtttaaaagactcagtctaggcttgcctttgcaaaccaaaaacgaggacaggtctgaagtgggaagaaagctccgaaatagaaaacggttaggtcctattctatccccagcaaatctaagcaagaaatctctttatacaccacatggcccccccactcccataaaacagccttggtaataaagaagttatcacaccaagacataccttttagatttttattagtagttctctctgaagaatcaaaatagttagttagcaaattattttagattcaagactgtatatcctttgtatttagatctttaatgatgtacaacataatacaaaacaaaccagagagactga

SEQ ID NO: 16460 - DNA, 1890 bp, Homo sapiens
cccagcccagggcccggtaaccgcaaagcccccagtcttcatgcagaccttgaaccctccgtcacacccgcaccatgtactcccaggaacctcccacctctataccacccattaagtggctgctgacttaaatgtgctggaaccagctgctgaaggtggggcctagggagggggcactgaagcaatctcctgctccaacgcacaatccttactgtgccctttccacccccacactcacaccaatctgcagaaacctcttccctggggtggaagccagagagcttagaggaaaaaggtcagctctcttcctgttatacatggttatacatggttggggtttaaaagcacaaagagaaacctccccctcctggctttcgtggccatctttgtccatcttaggtggggacttgatcttatttaaggtctccaaatagcccccaccacacttagaacgtgtgttttcttagtgttagaagccaggccctgagtccccagcactcacctgaactgtggctgatttggtcccagtccagctggggaggtgtttggctgacaaggaggcaagagatcccctcccagggaacaggaggactgggcttagcacagagccatcatcatgttcccaatttgtgaagagactcctaacactgcactaacccatttgtgtacatacatgggctcagccctgggccaaatgtgcctgatgggaacagacttgcagggccatgcaggccagacttcgtgccttaactgaagagtgtgcgtgtgtgtgtgtgagagagagagagagagagaaacacgcatcatgggtccctgatctatgaaatgaacacaacctctctgaggctggatgatctggaggaagggggcatggagcaaatttgaggctctgattgctgagccagcctcctcccaggcggtttccccaggactctcgtaggaaataaatagccctttcaagattcctcagctgcctcaccccctgcacatgtgcctggggtgtggcctagaagggagtgatgttcttactctggtggtctgtgcttctgaacacaggctacatgcacacactgacaactaccaataaacagacaggggaaggtctttcatctcagccattttctcttccccccgcccccccttagatggagtcttgctctgtcacccaggttggagtgcagtggcacaatcagctcactgcaacccctcctcctaggttcaagcgattgagtagctgagattacaggcatgcatcactatgcctggctttttgtattttttagtagagatggggtttaccatgttggccaggctagtctcaaactcctgacctagtgatgcacccaccttggcctcccaaagtgttgggattacaggcatgagccaccacgccagccattttctctttctaagaagagcaacctcagccggagtgagttttttctgactttgcagctgagtctggagaaaagtggcatgccagagcgggtcggtgggaaacagggtgaactttagcttccatcaacagctctggtagcaaaaccagtcccctaccccctagagaatgcatccgtttccccacctgatatggtttggctgtgtccccacctaaaactcatcttgaattgtagctcccataattgccatgtgttgtgggaaggacccagtgggagataattgaaatatgggggcagtttccgccatactgttctggtgatagtgaatagatctcatgagagctgatgattttataagaggtttccccttttgcttagttctcattctctcttgcctgccgccatgtaagacgtgcctttctgtcatgcttgtgaggcctccccagccacgtggagctgtgagttcattaaacctctttttctttataaatta

SEQ ID NO: 16461 - DNA, 163 bp, Homo sapiens
atgggacacaagtcacttcaagaagtctggtggtccccagagaaacaactatgttatccatcctgagtttgtgtctgagacctatcccgactatcgttgctggtagagcctgggcttgctgtgccaagggggcagagcaataaataaactcttcaaccccaaa

SEQ ID NO: 16462 - DNA, 2779 bp, Homo sapiens
cgggcggggccactgcggtcgccggggcggggccgccaagggccgggtaggacgggcagaggccgaccccttcccagctcgtctgcctgcccccggccccgcgcccctacagccgccaacctcgtataacagtcattgcttcctcctatggtaggacgtgtacctctgtgtgttcatggagctggagaaaccaaaactgggtctctctccacccgggagctgaggaggggtgggggccgtttgttcagttacctgggggaacctcacccagcaccctgccccgcttcccagggctggccaagagagaagactggacggcagggaggtcaacattaacgagtggggggatcacaaagccaggggcttggccccaccccagcgaagccatgaactcccaagccccggcctcagcctaaccaggaaaggggctcggagggagaaaggcccagggcagtggggacgggtcccagcacctcggagcccccttcacacgccccctaccggcccatgtttctatttgcatttccccctcctcagatgggaagcctggcaaagctgcccaaccgggtagtgcccctcacccatcggatcactgccttcttcctcctcttgccccattcacccgcttccttgcactctgggagtggggcagggtaaggtgggccttacagacaggctgaggtttgggtggtgtgatctgtcctaattggcccctcaccaatgcatctatctgtctgccaccagcccaccccaccctgcccccaccctcacccacgcttctgctcattggtctcaatcccagcctggaagcagggagtaaggctggactccaatggcccattcccctcaccccagcccaagacgtgggaggctgcttcccagtaagaatccaggagcaagctttggtgaatccagtgggctgagtggctctatggatgtggttgtttggatgtggtagggagtgcttagcagaatgtgtgtgtatctctgaggctgtcagggggtgggtgggtgtgtgtctctgttggacctgtctctcctcagtctattcctgtcatagatgtgggtgtccctggtagggaagtgcctgtgtggtctgtttacagtgcagaaggcggctcagcagtgcaatgggctgacagccttggaccgggagtcagaagcctgggttctggttgtagctctggcccctccctgtgatcttcaacaagccacttgctttctctcgtcttcagtttcctcaactagaaaatgaacagcagctgaaattatgttgaagatccttttatacctgaaagagtttcttcatagaaatttctgtggtggggagggggcaatctctgtgtgtctcagtatacctaaaggttggggtggggcggagttgtgtgtctctgtagaaaggcgaaggggcagttcctatcaggactgtgtatgtctgagcacatgtggctctgtttgggattacgtgtttgtctgtgaatgtgtgtgtgtgttggagggttgtctattgtgtgtggctgtatagggtgtctgtagatcaagatgtgtatacagctgcttctgctattgctggtttgggggaggggactggaaagctgagactgaaaatcaagagggaagaggtgaggaaggcccacccctggggctgggcagtgtagacctgccaccgtgtgaagaaaaatgaaagcacagatagcctaagactgcacaggcctgtgcccacataccttatagcacaggcccaggtggatcatctcatgctaacaccccacatgtgctggtggatccactcccatggatccactcacatgctgcaggcatgcagtagactcacccacagcccactctctggacaccaatcctgggaggtgggagctggaatggggagcaatgagaggagggagtgagactgttggcttaggaagggtggtacctctccctgcatcatacccaggaactgccagctccaaaatattggggtacagctcaccaccccccactccgccaacccattcctacctcctctagtgcagggacccaagttagatgatgagaaaatgccaaacaaagggaggcaaggacagagaaggtacctgcaggacccacaaggcccatactggcccccatctgaacccacctctcccacccagatcaacatccccccaacccctgtgcccccatcatctggaccccagagccagccctcccactaccaccaccaccaccccggggctccttggctcacctttctagaacatgggtacctcctctttttgggggctcatttagactgctgcctttgctgctgacttgcagtgtgactcgggcccattgttcaatctctgtggccctgagacaccagggaaaatctccccccccacaggacatactagttccctggcaggcaagggcttccaactgaggcagtgcatgtgtggcagagagaggcaggaagctggcagtggcagcttctgtgtctagggaggggtgtggctccctccttccctgtctgggaggttggagggaagaatctaggccttagcttgccctcctgccacccttccccttgtagatactgccttaacactccctcctctctcagctgtggctgccacccagccaggtttctccgtgctcactaatttatttccaggaaggtgtgtggaagacatgagccgtgtataatattttttttaacattttcattgcagtattgaccatcatccttggttgtgtatcgtgtaacacaaataatgatattaaaagcatcaaacaagcc

SEQ ID NO: 16463 - DNA, 423 bp, Homo sapiens
aggcccctggcctagcctggagcccaggacctaagtccacctcacctagagcctggaattaggatcccagagttcagccagcctggggtccagaactcaagagtccgcctgcttggagctggacccagcggcccagagtctagccagcttggctccaataggagctcagtggccctaaggagatgggcctggggtgggggcttatgagttggtgctagagccagggccatctggactatgctccatcccaagggccaagggtcaggggccgggtccactctttccctaggctgagcacctctaggccctctaggctggggaagcaaactggaacccatggcaataataggagggtgtccaggctgggcccctcccctggtcctcccagtgtttgctggataataaatggaactatggctctac

SEQ ID NO: 16464 - DNA, 638 bp, Homo sapiens
gcccggcaccccatgaggacatgcagagcacctgcagaggagcaggaggccggagctgagcctgcagaccccggtttctattttgcacacgggcaggaggaccttttgcattctcttcagacacaatttgtggagaccccggcgggcccgggcctgccgccccccagccctgccgcaccaagctggccctccttcctccctcaggggaggtgggccatgcagctaacccacccaccaaagaccccctcaccctggccccttgggctggaccctccaatgccagcgactcccaggagcccttgggggacgtgaggggagcctctcacatccgatttctcctcctgccccagcctcctgtctatcccagggtctctgttgccaccatcagattataagctcctgatgctgggggggcccagccatccccctccccccagcacccacaattttcagtcccctcccctctgccctgttttgtatacccctcccctgaccctgctcctatcccacagtatttaatgccctgtcagtcccttctagtctgactcaatggtaacttgctgtatttgaattttttatagatgtatatacagggtggggggagtgggcggttctcattaaacgtcaccatttcatga

SEQ ID NO: 16465 - DNA, 309 bp, Homo sapiens
agacctgctgagccagcctgttctccgggcctgaatgtctggggtgcttgtgccttttctgagaagcgttgtgactgctcaacatccccatcaaggtttgagtccacaaaagtggacctccctatcatgcttccccttccctctagcatgtgggaagggactgctgtgaagaatgacagatgtggggcctctgccaagttctgcattgctaaataagggcttcctctgccttctacctacagtgcatttgaactgccttctgaaagaggtccagggagggatttaggaaataaagtttctacctatttg

SEQ ID NO: 16466 - DNA, 321 bp, Homo sapiens
acaatgcttctctccaagcaattcgtgcagtgggatgagctactttgccagctagaggccgccacgcaagtgaagccagcagaggagtgatagctgctccccatcccaaagtgggcctgggcagtcaggctccagggccctatgccaacctgcctttgttacaaggcagaggaagctttgtatttattggcttcaaggcccacctctctgtactctgggctctaaagttggaggtcaggttacctgaggtttgcaatttgcaacacccaccctccccccaatcagtgttcttatttcagtgacaataaaccatagagatga

SEQ ID NO: 16467 - DNA, 909 bp, Homo sapiens
ccagccaggcctgaaggaagacctgcggatagacaggagcgggcaggcccgcacatatccacttgctggagcccatgtttacagacagggacatacaccatgcagatcctgagttcctgctgtatgagcagggatatccatgcttatgtatccaaacacagagacccatgggaacaaatgagacacatatagatactgagacctgtgtgtacagtaggaccatgcactcacacccatctggagagggagcccccggtataccaagggagccagttgtgttcagacacacacatcacagcttgactcactaactgaggcctttccatagctccacagcttcccacctcctccccaccaaaccggggttctagagttaaggatgggggagggtattatactgcctcagtctgactcctcaacccagcagcaatttgaggggatgagggggaagaggagctgccttttggaggcccccttcacctgcagctatgatgcccttccccttctcccctgtcctcaccatatgccttatccccattctactcccctgctatgcaagtgcccctgtggcttgtccccaaccccctcagcaacaaagctcagctggggaacgagagtaatttgaagaatgcttgaagtcagcgtcttccattccagaaagacccccattcttcctttgggggtatgatgtggaagctggtttcagcccaggacccaccactgaggagaggatctagacaggtgggcctaattccaaggggcccttcctggcctggagaaggccttttacacacacacaacacatacacacacacacacacacacacatatcacagttttcacacagcccctgctgcattctctgtccatctgtctgtttctattaataaagatttgttgatctgttcc

SEQ ID NO: 16468 - DNA, 48 bp, Homo sapiens
agcccccaatagccaaataataaagcagcattggataataatttctga

SEQ ID NO: 16469 - DNA, 247 bp, Homo sapiens
cctatgaccgtgcagagggagcccggagtccgagtcaagcattgtgaattattacctaacctggggaaccgaggaccagaaggaaggaccaggcttccagctcctctgcaccagacctgaccagccaggacagggcctggggtgtgtgtgagtgtgagtgtgagcgagagggtgagtgtggtcagagtaaagctgctccacccccagattgcaatgctaccaataaagccgcctggtgtttacaact

SEQ ID NO: 16470 - DNA, 387 bp, Homo sapiens
cccagtgagcagcctggagccctggagaccccaccagcctcaccagcgcttgaagcctgaacccaagatgcaagaaggaggctatgctcaggggccctggagcagccaccccatgctggccttgccacactctttctcctgctttaaccaccccatctgcattcccagctctaccctgcatggctgagctgcccacagcaggccaggtccagagagaccgaggagggagagtctcccagggagcatgagaggaggcagcaggactgtccccttgaaggagaatcatcaggaccctggacctgatacggctccccagtacaccccacctcttccttgtaaatatgatttatacctaactgaataaaaagctgttctgtcttcccaccc

SEQ ID NO: 16471 - DNA, 553 bp, Homo sapiens
gtggtggtggccagcgtgcagtgagctggcctgcctggaccttgttccctgggggtgggggcgcttgcccaggagagggaccaggggtgcgcccacagcctgctccattctccagtctgaacagttcagctacagtctgactctggacagggggtttctgttgcaaaaatacaaaacaaaagcgataaaataaaagcgattttcatttggtaggcggagagtgaattaccaacagggaattgggccttgggcctatgccatttctgttgtagtttggggcagtgcaggggacctgtgtggggtgtgaaccaaggcactactgccacctgccacagtaaagcatctgcacttgactcaatgctgcccgagccctcccttccccctatccaacctgggtaggtgggtaggggccacagttgctggatgtttatatagagagtaggttgatttattttacatgcttttgagttaatgttggaaaactaatcacaagcagtttctaaaccaaaaaatgacatgttgtaaaaggacaataaacgttgggtcaaaatgg

SEQ ID NO: 16472 - DNA, 270 bp, Homo sapiens
ctgccacgttttgaagagcttgagctgggtccccagtgggctgtctctctgtggggagggctttctgcttcaccatcattaggaatgtgaccattcctatataattcctggactggtgagattggtggtaggcctgtgaaatttgccctagttactaccattctcgttttggaggaaacaatctctgccaccaccaagtcattgactttgctcgaggcaccttttttcctgtttctccttttctgttgtcgagtaaaatttcatatttat

SEQ ID NO: 16473 - DNA, 399 bp, Homo sapiens
cctagtctgtgattactggcacttggctacagagagtgcttgagaacagtgtagcctggcctgtacaggtactggatgatctgcaagacaggctcagccatactcttactatcatgcagccaggggccgctgacatctaggacttcattattctataattcaggaccacagtggagtatgatccctaactcctgatttggatgcatctgagggacaaggggggcggtctccgaagtggaataaaataggccgggcgtggtgacttgcacctataatcccagcactttgggaggcagaggtgggaggattgcttggtcccaggagttcaagaccagcctgtggaacataacaagaccccgtctctactatttaaaaaaaagtgtaataaaatgataatat

SEQ ID NO: 16474 - DNA, 139 bp, Homo sapiens
tggagctgggcttggccagggagtctgggaacaaggaagcagattttcctgattctggctctagcttccctgccaagattttggtttttatttttttatttgaactttagtcgtgtaataaactcaccagtggcaaacc

SEQ ID NO: 16475 - DNA, 1098 bp, Homo sapiens
ttgccagcactctgaacccatgcgggctaatgacctgcccatcctgctccatcttagagaacatatatggagagacagcaagagacccttcaggcttgaattaaagccctcaccatgctcacgcccaaatggattatttgggtgtttaaagcttctgattcttactacaccctgccctacttcgggtactccatgtgcctgtcccctcccttgggtttcccaggccagcttaggtagtagggaggaactggagctaccctgagattttctcaagttcccaggcaagttatgccagcgttgcctccctgtcctgggcaggggccacttgttattttatttatttttaatttataatttattcaaattggattgccttggtaacctcccacacctgataattggcatcactcctccccgcttcccactctcagatattgctccaacctcaggagttgaagaggcttatgcggtgggggcaggaggagaactgctttccctcagctgagggaagaggggctattccagagggactgagtcagtagccaaagactcagcttcccctgtccttccccagtcccttcacttcccctaccctctgacctatctctgaaagccaagttatgcgtatgtgtgtgtgcacaagcttgtctttgtgtggtatgtgtgtgtgagtgtgcatgtatgcacacacacaggggttaaccacccctcacctagggctccagactccagttgtccctctcctcctacctgtgtctccttgttttggggtcctgactgaagaaggtgtccagggggcagagtcagggccaagcactggggtgcctcctctcacctggccagactctgacccacctacctcagctggggtgaggggcacccctcaaactcagtcatgtggttccaaactaccccattccccactccagactctgacccagcctcagtcctaactcctggggctgggctgaggggaacaagcatttgctgaaacttgaaaaaacaaagcaaatcaaaaacaggaaaaaattgtacctggtacttttttttagaaaaaaagattaaaaaagaaagaataaattcttgtttggaaacttg

SEQ ID NO: 16476 - DNA, 322 bp, Homo sapiens
acactcatgccaacaagaacctgtgcccctccttcctaacctgaggcctggggttcctcagaccatctccttcattctgggcagtgcccagccaccggctgacccacacctgacacttccagccagtctgctgcctgctccctcttcctgaaactggactgttcctgggaaaagggtgaagccacctctagaagggactttggcctccccccaagaacttcccatggtagaatggggtgggggaggagggcgcacgggctgagcggataggggcggcccggagccagccaggcagttttattgaaatctttttaaataattg

SEQ ID NO: 16477 - DNA, 548 bp, Homo sapiens
gatggagggcctggcacagcggggcgtgcactgccccagccccccgtagcaggggcatgactgtttcccaaccagcacccaaagacgggcgccattgccaagtcacaggatgtgatctaccccggacttcctatctgagcttcaagggagacatctcagggcaaagctttcgtgatggaggaggcaaagacagtagccccctccttatttcttttttctatctgttcctcttagcccccaaactcccaggttctcacttccttcttctggagtttaaccagatcctccccacccccgctccctcatagtctacccccacgcctcagtgtctcctcaggcacaggaagtgggcggtgggggaggggtaagggcctgacagtgggtgggtgggtatattcctcaggagtccacagactggagtggacctggaacttagagacgggagggacccgagcctggcttttgacctaagaaccctagcaggagaatacagtctccatcctgctgtctctgtcctgtccccaagttttcaaataaaactttccaaa

SEQ ID NO: 16478 - DNA, 2643 bp, Homo sapiens
aggaatcttatagattccagaactcaggatacctcagggataggtcacagccaagagtacaaaggaatcttcagtactgaacaaaacagaacccttcatgatttgacaaaggtcactttctgtttgcctggaccaagctactccagatcatctgaccaactcttaaaaatcacggccaggcacagtggctcatgcctgtaatcccagcactttgggaagcagaggtggcaggatcattccagcccaggagttcaagaccagcctgggcaacacagtgagtgagaccctgtctctatttaagaaaaaataattaagaaattttattaaaaaagaagaatcaggaaaccaagtccaacccaactaaacctcaaatgaaccagcccctaacacagatgaggggatttgggactgataagctctgtgctgtgtccatggcccgtcatttatcaaggctgcagctttgtaaatgtggctatttttatgttgtgtatagtttctatcatttatttttccactggatttgagtaaagttttttttcttttttttgggaaagacccttctgtctcagttttgctatgagaaaagggatttttgggccctgaacgcgggcatgctggtggcctcaggaatacgaggaaaagagctggagctccctctatcttctctgctgtcacactggaaggcagcctctttttgtcctaataaggacagctcttcaagaaggcccagttgtccttaggcacctagtatgggtgtgtacaaccaactaggatcgaaaaaacacacaggagcactccatcatgaaaacagactttgttttagtcgaccttcagctgtcgtccctccttcccagccaaggctgtgactggggccctttgccacagcctggctgcaccttctccgtagtccccgccccacctcccaggaagtagctaggttccatgtctctgtgctccagtttgtgggctcctcccaggcctgactgtcaccaatctcctcctcgtcctcctttaaacagaagtcctcaggaagaggtctgctggcctctgtgtggggagagatcaggaatgttccagtttcagagactttgtctccacctccagcagactcgcctcccgagccttcacctggttctgaagcctccatatccttgtccggcttgctatcttgcagcagctcgtggatggtccatagcttcatgttcagaagctcctgctgggctccagccagagtagtcacactgaagaaatgtccactcagtggctcccaacctatgtccccattcctccctcctgccacaaattccccaaaaattcacagaatcattgctctcctcaccgctcaaaaagggggtccagctgggccatcaggttgttcaggtgctgctctgtctgggccagctgttgtgtcaactgggccagctgttgctctggggataagggaaaaaagggggcagaagtggttatgtatcttctgctgtcccctaaactcccccgacccagcacagacttctgctaaacccacctgactgcagtggctgctgcttgcttgcctcctcgtggagaaccgcagtttcatctttcccctgttgtggaagaaggaaagggcagtactgaagcaacaaggttctgctccatcacctcagtctccagagccagccaagagagagtgcaatttgagatggagacagtgattgggtttttacctcagagaatcacaatcctagtctatctagctcctcacccagcatatgaagcgacgtcctatgtcccacacatggtcagtttgctgaaacacctccaggaatgagcaactccctccggtttgaaaaaagctctggtggctgagtgctgtggctcacacctgtaatcccagcacttcgggaagccaaggtgggtggatcacctgaggtcaggagtttgagaccagcctggccaacacggtgaaaccctgtctctattaaaaatacaaaaattagccgggcgtggtggcaggtgcctgtaatcccagttacttgagaggctgaggcaggagaatcgcttgaacctgggagccagaggttgcagtgagccgagattgcgccgctgcactccagcctgggtgacagagcgagactccatctcgaaaaaaacaaaaactttggttgttagacagttcatgcacaaagccaaaatttgtcctttatgtatcttctttccatagtgcttactggagccttccaaaataatgtctcctcaaggtgacagcccctcaggaatttgaaggcaatggtcacaccctcacccactttcctgagttttttctggtttattaacgtcagtctttacagtcagtgctcattgacggtggttttctctggttgtttcctgaacacgtagtgctcttaaagcaatgccctgaggagaatacaattctccaggggcattctgattggcaggtgaagcacagtgccatgttcccagcactgatttgggaagtggcttgtcacatcccacagtgaactcagtcaactggaatgcctaactctctttcataagacctcctgctacattatgtttctcccagactgtactcaggtccaagaacagaatttactagtctatccttctcaaagttcatcattaaattcagtcattcatcct

SEQ ID NO: 16479 - DNA, 232 bp, Homo sapiens
gccccacgccagcgtggccacctcagctctcttctctcctctcctttccattctctctatggggaggggagcaggcaggaggagcagaaattgccaacattgcacagccaggctgggagcagcctagggagagcccccatcatgcccaccacccactctggcactggcttcatcctttacctatccccttccaccctcctttgctgcttaataaattctgaacttggtctcc

SEQ ID NO: 16480 - DNA, 88 bp, Homo sapiens
gggccagccccacccccagccaggctatggttgccaccccaacccaataaaactgatgttactagcctctcaaggccctttaatcctt

SEQ ID NO: 16481 - DNA, 454 bp, Homo sapiens
agaagcctcttctatttaatgcagacccggcccagagactgtgcgtgccactaccaaagccttctgggctgtcggggcccaacctgcccaaccccagcactccccaaagtgcctgccaaaccccagggcctggccccgcccagtcccgcagtacatcccctgtcccctccccaaccccaagtgccttcatgccctagggccccccaagtgcctgcccctccccagagtattaacgctccaagagtattattaacgctgctgtacctcgatctgaatctgccggggccccagcccactccaccctgccagcagcttccggccagtccccacagcctcatcagctctcttcaccgttttttgatactatcttcccccacccccagctacccataggggctgcagagttataagccccaaacaggtcatgctccaataaaaatgattctacctacaa

SEQ ID NO: 16482 - DNA, 302 bp, Homo sapiens
gccgtctgaactgtgggagggaagtgctaacagcccagcctccagcctggcctttcctccttcccctctgaacctcctgcaaccctgagccatcaggacaatcataccccttcccttctctccacccaattgtgccagtaaatgggggttgagggtgacctaggcagcattagaatcacttatttatttctttcctcacctgttccctgactgcgtgaaatgttcagggaggtcagttgatttccccaggtacattcatggtgtgacagacacatgggtacaaataaaagacccagaaagcc

SEQ ID NO: 16483 - DNA, 386 bp, Homo sapiens
ggaggtaaagcaggcccagtgaaatggacctgacagcccaaactgtcagagaggaggaaagcaggcatttgattttggtaattgtgccaaagctatgtaagagaataaatgccattgttttaaggaaatacacagtgaagtttttaggaaatacacactaagtatttagggataaagtagttatccctaaatagtagtctgccacatgccaaacaatgttaggtactttccatacaacgaatctattattcccatcttacagataaaacaactgaggctcagggagattctgtgacttacctaaggccacacagttagcaacaagccaatattcaaatccagatgatttttactcccaaggacaataaatccaactcaataacttc

SEQ ID NO: 16484 - DNA, 92 bp, Homo sapiens
acctgccaactgattaaaggacaccagactctggatgcttggatggaaagggaaaaatggaccctgtgatgctaataaaactgttctccctt

SEQ ID NO: 16485 - DNA, 75 bp, Homo sapiens
ggacagacactgtcagcaactggcacaggcctttgtgagtctggcccagatcagcaataaaagaggagtcattgg

SEQ ID NO: 16486 - DNA, 848 bp, Homo sapiens
ccaggctggagtgcagtggctcaatgcaacctctgccccccaagttcaagtgattctcctgcctcagcctcttgagtagctgggattacaggcacatgcaccacgcccggctgatttttttttgtatttttagtagacagggtttcaccatgttggccaggctggtcttgaactcctgacctcaggtgatccgcccgcctctgcctcccaaagtgctgggattacaggtgtaagccatcacacctggccctagtgacaggtttttatgggtacttttagatgatctaagaaatcatgtgcatatatctttcagatttctattttgggaaaatgaaggtttctacaacatattgtttcagtgttcaaataaactgaaggactcaacattacatttgaactatatccttcctagtgggttagtgtgaaaaagagtttggctgattcctaaaactctgccagccctgcagtaatctccagggcctggttattgttcagacattccatggtgattcctgggaaggaagcttggctgctcagtttctgagtctggggtgagataatgttctgggaagggacatctgttctttggtgtaatctctcatggtgaaatctgctctgtacatcagacaattgcattgctaccaagtttcataccaaatatttgaaaggatggtattgaatctaaaaccaaatattagtttttattaaactcatgggaaggctaatatattccaacgtaaattattacatatggttaagtaattgcatgttaatttattttaatgtaaatatttttgttactgttctgagccaaattctaaagaaaaaataaatacatttccttgttg

SEQ ID NO: 16487 - DNA, 3348 bp, Homo sapiens
ccaacctaagaagcacaaatttagtttgggtgttcctcatcacatgtatatacggactatccattgaacttaatctgtgtggcttccagccctccctttaccaaaagggtcaatggacctttctttgcactgtgtgacttaatcaactataaaagcttacaattagtcttcacagttatgggattgttatactaaccgtgtgattggaactccaaagactttttctttagcttaattttgtgtgtgcactaacattccctggtttttgtgtgatcattccgagtgttgctgcaagattacagtggacgtgatcttttagcatgtgcttttataaaaagtggtagctacagatgatatagcaatctaccttatatagagccttcagaaactgtgagtggaaatgaatgcgcagcgtatgactgttggtgataagtgtatctgtgtgagtgtgtgcaactacttgtgtgagggcatggtagctaacgtgtgtatgagatcctatataccagcatgtaccaagaatgtgtgtgtagttttaattatgctgcaatgtataatctggtgtgttatttaaacagcactagtactgtacactggtttttttcccttgtgtttgctgttgcacactgattgctgagggtgcatcaattacaagcattgaatactccatccccttccctcccagtgaatggaatgagaaaagccttcttcctttgcttcaggcagctgtcaccttctctttattggtggtcctaagtgggtcacttaagaaaaaaaagtgtaacaaattctcgctccatgaacctggtttttttttattctgttgtggaaatttttaaatctccaacttgctgtttccaaaaagaaggtgcaatatcatatatcatcagttagcaatattagcatttcaatcagtgatttgaatgttgatacttttttttcctttacatttccagtaagtttcttacagaaagtacctgtgattttttttaatgtttagatttgtagtctagtctattctgaagatatttgattaatatatttctaagaagaccactagtcccatgaagtctcaccttgttgacttccaccagaacaaaacctgttaattcagcttgacttctcatatgtgttctgtgttcaagctcctgtgggcaactcaattgttttaagaaaactctatttctgttcatattaattcacttgccagactccaattctgaaagttgtctagttcttccttcatcacacgtgcttctcatcgaaaccctggtttcaggatggatcaagtgctgttacagctcatgttccttagacctgatttgttttgatattttactgcctttccttttaatttttgtttgaatgagaaaagtttaatacaacaggtgtccagaatacttgcagtataaatgaagatttggtttttgtataaaaaaataatgctgttaaacaggagttgaccttcatttagttgatgtaatacatagctgtatggggttttttttagtaagttctttgagcataattcactttaaagtcatttttccagcaatgtttaaattactttctcattcttttagtgtattcaacattgtctgcctcttcctgcagttgatgtaattgctttgtttgcaatagcacaagctgcattattccagtcaggactgtgataacttgctgccagccccactcaactttcagttggctctgtgtcagttttccattcagtgttaactacttgttactgccatgctgcttgccctcccttgaagtgtctataagctcatcacagcctagagttaagtaaagtcaattcacagaagcacaattttgccctttgcgagacattgttgcctctatctagtcctacaagtagggttttgcatactgtgtttgcccctagggttgtcagtgcatcagaaatacttctaaatagtggtaaaaatgcacatggttaatgcacatgttacttttaaatcattaggatatccctcacctgttcctgatgaataaaaagtgtgttaaagaccaaaattcttggcataataatcagctacatacaaatcacatatagtttaatcttttttaatgaaaaaaaatcatgtttaaaatggcaaaagcccatcttatacacttttatatagctgcaaaaaatttatatctgtacagatctaacactacgacactcagtattcattttattgaagcatgcaagtaaagcactttttctaatttatatagaggtatctaattaacacagcacattgtactaatgactaggagtagcagctttttcttctctccctctatgaattcttataatgtccctttttctgtaagtttttgagaggcaattggcaatttaggaggcagcagggtctgttttggtcaaatcttgaatttcgttgttgcactctagtgactgatctttgggaatgtcttgtctttgcatggggctcatagagatgtgtgcagacttgcttattgtggttagtgtgtatcaggaacacacacacaggtgttctgaccagctcaggcttgccacagtgagcaactctgtggctagcaaaagagaagtttatttgtgcccagccattggtcaccttgggtgatgcaccagatagcaggcagatgttggttcattggccttcgtcctctttcctcctaaaataatattggctttaccatcttaactcagctgtgggttttttgtgggttcttgtttgttttttggcatgaattgtcatctttggtgtttttttaacccccagcccctcaaaaaaataaggcctccaggtatcaagatctcatattaggattttctgtccttaattttttgagcaaaatctggaaaatgtgaaagcatatttagattttatatactatctgaaatgtgatttgttaagattcttaaatttgggcctcttagaataattttgaatgagatctaccgactcacttgtgagaatatttttcacagattatctttgggccttttcattagaaagctgtttgtttgtccccctgttggtacatttggttacctcattttgccgtttcagattgtgaaagctcacaggggtgttttttggaatcatttgctgagtcattttctcaaatcatattccattgtatcagttaacatatagttttaaatgtatgtattataaatatctgtaaccaaatcatttgaaggcttgataaatttttaacaaagtttgtacattttttatgaaagttactagtaatgctttactaagtagtgcaatgaatttttatttttaatccctgtgcccaattttggagttgagagggttgttggtaataaatgtatgatgtacactt

SEQ ID NO: 16488 - DNA, 2026 bp, Homo sapiens
cccttggagccaggcgggcaccaaacactgatggcacctattgagggtgacagccacccagccctcctgaagatagccagagagcccatgagaccgtcccccagcatcccccacttgcctgaagctcccctcttcctctcttcctccagggactctggggccctttggtggggccgttggacttctggatgcttgtctatttctaaaagccaatctatgagcttctcccgatggccactgggtctctgcaaaccaatagactgtcctgcaaataaccgcagccccagcccagcctgcctgtcctccagctgtctgactatccatccatcataaccaccccagcctgggaaggagagcttgcttttgttgcttcagcagcacccatgtaaataccttcttgcttttctgtgggcctgaaggtccgactgagaagactgctccacccatgatgcatctcgcactcttggtgcatcaccggacatcttagacctatggcagagcatcctctctgccctgggtgaccctggcaggtgcgctcagagctgtcctcaagatggaggatgctgcccttgggccccagcctcctgctcatccctccttctttagtatctttacgaggagtctcactgggctggttgtgctgcaggctccccctgaggcccctctccaagaggagcacactttggggagatgtcctggtttcctgcctccatttctctgggaccgatgcagtatcagcagctcttttccagatcaaagaactcaaagaaaactgtctgggagattcctcagctacttttccgaagcagaatgtcatccgaggtattgattacattgtggactttgaatgtgagggctggatgggacgcaggagatcatctgatcccagccaaggaggggcctgaggctctccctactccctcagcccctggaacggtgttttctgaggcatgcccaggttcaggtcacttcggacacctgccatggacacttcacccaccctccaggaccccagcaagtggattctgggcaagcctgttccggtgatgtagacaataattaacacagaggactttcccccacacccagatcacaaacagcctacagccagaacttctgagcatcctctcggggcagaccctccccgtcctcgtggagcttagcaggcagctgggcatggaggtgctggggctggggcagatgcctaatttcgcacaatgcatgcccacctgttgatctaaggggccgcgatggtcagggccacggccaagggccacgggaacttggagagggagcttggagaactcactgtgggctagggtggtcagaggaagccagcagggaagatctgggggacagaggaaggcctcctgagggaggggcaggagagcagtgaggagctgctgtgtgacctgggagtgattttgacatgggggtgccaggtgccatcatctctttacctggggccttaattccttgcatagtctctcttgtcaagtcagaacagccaggtagagcccttgtccaaacctgggctgaatgacagtgatgagagggggcttggccttcttaggtgacaatgtcccccatatctgtatgtcaccaggatggcagagagccagggcagagagagactggacttgggatcagcaggccaggcaggtcttgtcctggtcctggccacatgtctttgctgtgggacctcagacaaaaccctgcacctctttgagccttggctgccttggtgcagcagggtcatctgtagggccaccccacagctctttccttcccctcctctctccagggagccggggctgtgagaggatcatctggggcaggccctccacttccaagcaagcagatgggggtgggcacctgaggcccaataatatttggaccaagtgggaaacaagaacactcggaggggcgggaatcagaagagcctggaaaaagacctagcccaacttcccttgtgggaaactgaggcccagcttggggaaggccaggaccatgcagggagaaaaag

SEQ ID NO: 16489 - DNA, 2404 bp, Homo sapiens
ctgtttgtccttacaagacaacgctgaggccagttgtcagactgaatttcttttggtaagcagttaatgcctttgggttcgaggcttccagctgcccagtggctcttaaacagtttagcaactaataaccggagaactaacatgtagtatttgtgctgctgcatttctgagtgaagtgcacgtcttgggaaagggatgcaatccctgaaaccaggtgcttccttggggttgagtaatgcagtcagaaagtagtttgtaattgatattaaaagtggcacatttaaaaatttaaaaattgaagtgcaaaaaaaattttttagcaatttttgtaaaactgtgtagcatttaaatttcctataccttctgatgggagtattatatccctgtatagtgatgcaaaatgcacttatgtgtaaccagtggtgatttggtgcctgtcttaaaggaaggcctttgaggacacacctgtctgccacaaatgctttaaagtgtatcatgagctagtcctaggcctcaaagtactgtattttttatttttacctgatttgcagtcataaacactgcactttggtgctgacactgggtccagagtgagcattctcttggactattagatgtatatacttttgaatacatcactgttggatagatgttttaacagttttttctggtttaaaaaccaaattgtaaatggagtgtgtacttgtagagagtgacaaggtattgtttccctatgtgctgtttgagcagtattttaaccaacttgtattacagatgttacagttccatgttaggaagtcagaaaagacttgtgtttgtctttgttctgctgatgtggagtcatgttttgtggggtcttccatggcacatttacctgttgctccgtccagatgttgagggccagtctaggctgacacatcctacccgaggacaagcctgttctccatttcttcactctcccctccccatatagcaactctcccaggtttagattaccgttttcgacgacagattaaccaaaaatgccccacacaggttttattactgttatatactatacttttaacagtacagaccctaaattttattatttgttgctcccccaatctgataccaaatgtttaaagttgtttgaaatccaaacatggtagtgttcatgggtaaatattttctaggctatgtaagagttagcagcccatagcatagaagtaatcaagtagcatctgagactgttggaggcactagggcctctctgggccctacagcctcacttccccagcctcaccttgctgtcctctgacactgccatcagggctgttagtggcacctgtatgaggccaagtgtgcgtccaggggaacagcacaggttaatgcgtctccctagaactcatgaagtcagtttaattcatgcatgaacatgagttcattttatgttttatatagctttcttagacataccaaaccatcattcataaatcagataaattattcagtttttgtgtttagaaagctaagtatgtgtagctggaaacaaaaatgagcgtgttttctctcctgttaatctagagtgtgcagttacacatgtgtggataatttcatgttccaggggcgcttggcatctcccatggactgattcccaggaagaaaagcccaaagggaaacccacgattcctttcgagtagatgtgggaaagagcccattggaggatatgaggtcctgtgaaattcagttgtgtgtgtggctccttgttagcagtcatgttgacatggtgttaggaggctccccatccaccctttacatgatgtagggaccagtgtcttgtgagattaaccttgggacacagtgggttagcctggagaaaatgagaggccctgcctggacccagggagaggagccagtgacacaggcagagcggtgcagccctccttcccttccatttggaggaggtggtgccaggagcctgcccgcttacctctgctgaagcataagtggactttgcttttggggcttatctctgatacatgctggagccctgcctctccactgctagatggaacctggaatctctcatctacctcttagtctgtcagtttctacgtgtgagaagcaagcttgtgggccagtgtccttgtacatgctgtagcacttaaaaaataattccagggttccctggaaaaccagtcccagggttcctatgatctgtagtttctacctggattataactggttttgggtacctgaattttgattggttagccttaattatagtctggcgtgatcatgtagaatcttttctggtgaacagatcataaagttctatcaaggagttctatcaaggcatccatgtcagtggtgctatgctggttacaacttgagatttttgaaataaaaaatttgtcatatt

SEQ ID NO: 16490 - DNA, 549 bp, Homo sapiens
aatcatacaggaagtgggaaaactctatccactggagatagtatttggaatgaatggaagaatatgggttaaggcaaaaaccatccagcagactttaattttggcaaacattttagaagcttgtgaacacatgacgtcagatcaaagaaaacagatcttctccagattggcagaaagttgatataggtggacttttttacaggtcagttgaggcaaaaaactatgggttttttcaggtgaacctcccccatttaaatactcagaagataaggtgtgaatgtatgtattattagagtccgaaagtatttttataagttactggttttcacccacgcttttgtgggagagaaaatcattgcaaaatcattttttttgttcggtacaataaagtttactaaaaaacagtattagggtttatttggagttaactcccttagtaattgctacagcttccataattaactggaggtcagcagtaaaataattttgtgattataacagtaagccaggttcaccagaggaaatgtggaatacctaagtataaagcag

SEQ ID NO: 16491 - DNA, 51 bp, Homo sapiens
aaaaaccatcagttaagtgccatttatcaactgaatagaccttctaagaag

SEQ ID NO: 16492 - DNA, 3922 bp, Homo sapiens
gcggaccagacctgccctgctctgtgacagagcctgagacttggaggtgccagaggccccccaccaaccagcccagccactgttgctggctgtgtcgtttgtgttgtgtgtatggtactagcacaccactgcatgtctctagaatgctgttgccacttacgggggctggagaaggcctggataaagacagaagggcggcaacacaccaccccagcccccacccccaccctctccttgagtttctgtgaattaaaatatttgcaaatccaaagagatgccttccaggatgaacaaaggcagaccagctccgaggggcggggtagggtggggcgggagctccctggctgacatctctttgttctccagctgtctcaaattcacacctctgtacagggcaaagttttcccacaggagcccccctactgatgctgggagccaaatgctggtgctttgagagtcccggaggccccggggttcccgccccgctggtgtgtatatgtgtgtctgtgtgagtgtgtgtgtgagtacagatgtgagaaggtggtcacacacagatgggtaagcccactgatctacttgtagtcactcagtgtaatcattaggctatcttcaaggaatcattgtgcagtcaaaaagaggattcaattatttatgaatagggtgtgtaaataaaatagtcatttaatatatagccttatccttttttgatatactgcagagggtctctgagggggcagttctggtttcactcccagagcaaggcgtgtctcctctgggcttgctgctgtggcaggccccagggaggggagggaggccgaggcctcagctccagccctcagcagctctggacacaagagccgtctgctctgacaactgggctgaggcagtcggtagcactctgggagtcaacccagagctcagagttcaggcttcagcagtggacatagtcaggagcctccagtgttgaccaaaaaaccagtctttccctcctgcagtgggacgtctgtgttgacacccccccaacccctggacacagcacccagctggctacaaagggctctctccccactatctgttagcaccacctgggaggtatttggcatgtagggaaagggagacagagaaggaacgtcatttgcccaaagccacacagctcaccagcagcagagcggttctgcagccaatgctctttcgttggttctgcatggccttgctgtcaccctgcccatggaggagggagaatcctgacctcccagggacatagagccctcagtggtccacactgcttccacacacaagaacacctacacacacacacacacacacacacacagccctcagtggtccacactgcttccacacacaagaacacctacacacacacacacacacacacacagccctcagtggtccacactgcttccacacacaagaacacctacacacgcacacgcacacgcgacctctctcttgcttgccatagcagggtcctcccacacaggccaggcagccccgatgaggctaagagtttctcagctctcctgctttttccacccacccagtagcatgaagatgtggctgccctctcctgaatgagatacaagggttccagagccttcgccaggcaccagctggtctgaatgaactagaagtttgacgactgtcatccctggcccacctgggcagagcacaaggggccgagtttgaatgtcatcagcaggttcagacatcagcgctgctcatgtctttagagactgtttggaggtggttccagctcactgttcacatgcagagacacaggcccggagaaggaggactcgccaaggccacgtgtcgagctgggactgagccctgcccctttaggtagctgcgtggacttcagcggtttgtgcaaagccctgcccttggtgacccgcctttagtgaccagtctgcctcttgggtcttcctcccaggccttgtctggcacgtccacgtggcccagccctcatagagaccacgctggctgtggcctgggtttaatctcttaaagaagccaatcctttccttgcctgtttggcatttcctaaaacatccctcaatgagggaggaaggcagggacaccctggaacgattcgtgctttcctttgggggagtgggaaggtaggtgggaaatgacaagatgagtgaggagttggcacttggccaaacagaggagcctggaccccaaggcttattctcagaggaggcccaagagaggctgaggaagagggggaacaaccctccggcgggggaggagggtgagacctcacactggcaagttcaggtccagccacttcctgaggctgctgggtggggccgcacctcacggtccttccctgtagaccatcttcccgggcacattgctcctcagaaaaggctctgggagggtctcagtggaagctggcagctgtgccctctggccctgacttggcctcttagggtattcctgggaccctccctctgtccctggccttcgtcttcctgaagtttccctgggaggcccaacctcctgcccctctcagggacagaggccagcagaggagccagcttacaggatgggagctgctgaaaagaatttttttcccttaattttatgaacctctccctcttcttcctctaattgtgaccgtttcctgtgtcagcctgtattcatgttttcttggacatctaacaattgaaacagcttttccctttcagaaacactcacattcaggttactggctttggtttggtttttgttttgggtttgttttttttttttttcatctgctgccaattaattggggaaaaaattgagctggatttctttgagagaaaagaaaagctcctgccacacaacgtcgcgccctcggcattttgtctgagaacctccagcactagcggctgtttctgtgtctcccttctttgctggctttattattgaccataatgcctgcccacttgagcaactctgtccttgagcgctgaggagtcaagggcccttctggcagccccccaaacaggatggcgcccacagaaagaaaggaggctttgtaggggaagagggccccaccgcctgccagtcccgtcctgaagtcagaagaatggcccaggctgacaccctctcctggagagaggctcacagcgtagctgttcccaggaaaggggtgcaaagactccgaggcttcaggaggcaggccctgtcctcacagggcggctgtgggccggggcccctctgtggcctgagagtgagcaggagggaaacctgaagcagctacccgcaaggcgtccggtcaacagggtggagctgcaggctccctctgcccattcccagaaccagcggccccctttgtaagatgctgaacacgaagttccggtagctccccagacgctgtctcagaagtggtgatatcattgaccaagggcctggcaaggaccggcagccagggtccccatttgctcttgcagccctagggactgtgcaggtagaagccctgccagcagagcaggctggcgtttggtgttggcccacagacacccgtgaagggtcatggccgaatcaggcagctgtccagccaactgtctctccacccttccagaattggtgatcagcgaagaccaaattcggcaagccatccagagggagtgcagggcgcacagtcttagatgtgggcgcacctcccagaaccccacggggacttgttcacaggcgcgcttgcaggagggcaagccccttggtcctggaacacaggtgccccttggcctttccacctccctccttggggctgtttgcatccctgccaggagccttaaaccagccacctactgctgaagtctcttgtaacattccaaatctatgtgacacactgtataatgatgaatatttaatgtgaagctcttaatatactacaagtgtcttgttt

SEQ ID NO: 16493 - DNA, 223 bp, Homo sapiens
ggtcttagaaacattgatcatgggatgatggaaaagtcaaataacggatctttgtgcttcatgaagagttggaaaacctgtgtgtgtagatgaccccttttgtgtgtttttaaaaattagatgcaaactagatctgtatgcagatgtagtttttagcagggcaaacagtgagaaacggatttgcatgtggcttttttatacttttgaaatgaattgttccatg

SEQ ID NO: 16494 - DNA, 1121 bp, Homo sapiens
gacagctctaaacagtgagctcgatgtgcaaaacgcagtccatgaaaaccagaaagagcgagtcttctgattggcagctgtggctgtctctatcatcgtgactgtggacttccctgctgttgccatcagggtgcacacaagcaggtgcagtgctgtcacctggctgaagacctgcagcctcggagcctctgggaggtccctttctccctcggtgaaacacagtcctccacatcaatttccaaacaatgaattaggtatggccattcatcactgttcagtagtttccccgtccaaaggctctcttccaaaactgcagtttgatctgtgttaataattgtggggttttagatgagaaaatggctataaagctgtggccctactttattttttaaaaatgacagaacttttgttcagatgtaaaagacaaaattgcactttaatgttttttgttacttgaaaacatatctgggatccctttttttggtcctctgctgatatttataaaacaagaaatgcttcttggactaccttcactggcatttccatagtcctggaatccagagccaagtggcctatctaaaattcacagcccttttattctcctgtgtgatggttaatacaacacagttgaagcctggaaacactaccattatttttggtgtattgctttttctaattgactgtttttaatgattttgatacattttaatgttgaaattaatattgaatgttagctatgaaattttagtattgaattttataatggaacagaacattggtaggtaacaagatgcaagaggatgtcaatacaagattgtctgcctgtttttctttgtaatttgtaattacagtttttgtaacttgtgattatgtttttaactaaatttaccaccagatacaaacaatacttcttacacagagttatcctttatttatatcattaagacgtgaatgaaacatcatcctaacttacttccccaagatattgagaggtcatatctgtttttctttatcattcatttctttttctaaaagttgttactgatatgcttttgatttcctatgactctattatgttgtacagaacatcttttcaatttattaaaaaaatagcttaactg

SEQ ID NO: 16495 - DNA, 693 bp, Homo sapiens
gggaatgcataccttaccacataacacgtagtgcagaaactcatgtgacataggctgggaacttgtttcccttatccatttcctttttcattaggctcatagtttgtggaaaaatcccaatatgccgtttattcaggtggggctgaccatgggatgtggtgctaatgataaatattacatttacccttggcccttaaaaaaaaaaaagaaaaaccctcacagtcttcctggttcataagatggatttggaggttatttctgcagcaaacttgggtcctgtgtgttcaaaaccatagagcacaaggtcaaggaagctagagtctgaaaaacgaacaattcacttccaggtcttcatcagggttttgtttttgttgctttaaagcaagagttaagtttatagtctgttaagctcttacaaatttggcttattagttaaatggacgtagtttagcttaaactttatgttagagtgagatgaaaccctatgaatataatcagttttagaaaaactaatcagtttattgtgcatcagagacgtcacatgaagaagaaaacttgtcgacatccaggatgatcaggagccttcattaaaacagaaattttagggaaaaccacaaaaaccttcgtaaagtgaattgcattaaacatcaattataataaaatttcatattttgaataaatgacatttttcct

SEQ ID NO: 16496 - DNA, 120 bp, Homo sapiens
gaacctactgggggcctcgtgtaaacctggggactggtatgaagctgggtcctaatgatcccctgggtcatattattcacctagggcctcatgtccacttggggcttcagtgtcaacctt

SEQ ID NO: 16497 - DNA, 1024 bp, Homo sapiens
ggtatcaggcagtggcggagggctctaggctgacatcgctggctgcccctttgggcggagaggggacctcaccagtttttttagtatcgcccacgcccagttccctggccaactccgcagggccctcctagagccaggtgggagtggggagcgacccgcagctgctcactccaccttgcgcggcccatactgggcgtgtgcatctgaatcccgctggagagcaaacacgaacttctgttcgttcgctgcaaaatggttagaaagattacattcctctaagctggattacgttcctctaaaaaccacctgaacgtaaccttcgcagggcgtcaagtcatcttttcttgccttcggttgtggcttctatggctgtcccgatttgcacattgtcatctttgaagattagtgacatagcattcatcttctgttgtcaccttttccgtcattccctgtatgcctgatggacaggtttcactgaagttcagagaacagcatgcaaaattagctaccaattaatctttatgaagtgagctgcatttctagccacactgagcttatgttttagcaggaagcatttttgggaaatgtttatgttagagtttgcccttcttgacaaggtgagacataaatgtctactttagagacatgaattaagatgggaagatatttgggggaatcatttactcaaacgctaagtaataaaggtacacaaagggcaaattatactagatttctttcccacttgttttctatgtctcttgcaattcaccttgattcccttcagtttctgtttaatgtagaaagtggcattttcattattttaagcttctagcacaatgaaagaatttctctttttcatgaacaggatcataaatgaaagggaggaagagtgtcctatatcatatttattgttcaacaaaacactgctccacggcttcaattcagtttaaaaaagagaatttattgaacatttaacacatacataaaaggcagtaaagacaaatgagaagagggggggatattg

SEQ ID NO: 16498 - DNA, 424 bp, Homo sapiens
cactagtggcatttcttatcaaaaggattggataataaaaataagtttctactgggtatatttcaagcatttatttattactttagttacgaattccaatatactttaaaatggtatttgttttacagcatacataaaatgtagcaaatcagtactgtaaaacatttaacattcatacaattatatataatatccttttttttaaagaatggtatttcacaaaaatatcttttgaaattggctttggagtttacatatactgaacatgaaagtttataataatgatgatacaactttcaacatcgtcattttttcttagaacttcagctgattgcagagatataatgattacattgttattaaatttttttaacacaagtaagtgtcaccattttatgacatgaaataaaaggttatgactgtt

SEQ ID NO: 16499 - DNA, 675 bp, Homo sapiens
ggcagagaaagctctccagcactcatgatgccaccactgtggggagcagctactgataataaaggcaaacgagggactgtgggaggaaaagccacaccagggaccccacaagagagcttggggaggggatgacagccctgaattccagacataactggccatgccagggcagggcaggccaggggccctggaagggtgtggccaacaccaagcagacatttcagagcattcacactaatcttaaccccggctggccttgggtccccaaaggtgtcactctgagagctctgcttacagagattctttctgctgtcactcaatttccctcccatcacctcaactccagccagggaggaatagatgctggttgtcaggacagccacatgccttcctgttctatatcacctagtaatctcaaagcgaaggtttgttgtttaatttattgattgttcagccttttgttttgttagcttgtttcctagttacctccagctgaccatactaccagagtgaggcagtacttcacatcctgggagatatgccctcggaacccatgaatgttattttgtattattttattttcatgatatgtattttttctatgtaaaaggaaaatgactgtaatatttgccttcaagatggttcaaacacaaaatattaaatgagctgtttctt

SEQ ID NO: 16500 - DNA, 502 bp, Homo sapiens
gggtgtgcttgtgcccctgtgggttttctttcctttttgtttttggtggtttgggggatgggagggttggattgaacagccagagggccccagagttccttgtatctaatttcatcctcaccccaccctccagggttgggggagcaggaagcccagatatttggaggaacagaaacaccagctgctccctcacccccccccatgccttcctggtccctctgtgcttctctctttctcctcccacagggtcccccttgccccagcccccttctgcctgttttaaacgagtttctcagctctattcaggccaggtcttgctgttgtatcaagggacacggtgtggaaagaggggctcaaacttaactccagccctgaacaggcaccacttactaagagaggatgaatgaaaagcacacctaccctttggcgtaatcctgcctgggaaggagagaggtttagtgccatgttcagtgggctgtttgctagaataaaaaattaaaac

SEQ ID NO: 16501 - DNA, 1041 bp, Homo sapiens
ccgcggccacacgcggtggcatgcatggaggactctcctcttcgtggttgtgtttctcgtgctgcatccctgtgtccactgagactttcccctctcgcgcccagcatttggttttacacaggaagagaagaatccacaaggacctctttactctctccgatttgcttttttttttttttttttttcaataccagggaagtttcgtatgcactcccttgaggatggagagcagccagcacccacctggtactgacccaggaccatcctggagggctttctgggtgtgtccagggggtgggctgtcactgcttgagggagaatcctcccttcccaggaggtgcagacttcttaaaaggagctcgcggggcagcaaagcagctgattcagcagtgcctaaaacccagttgctgatccctgctctctgagtttatctgtgggaatgtggtagtacccagggccagcccacgtcattaaggttatgcactgcctgccatgtagttggggcaccatacattatttcttcccagaatctctgagccaaccttaaacctcttctattgctagttctaatttcaacgtatgtgtgttttctaatacgagccttctcaccccaggataaaaggggaaataactgccttgggcaaggacaccatagtgtcacagagagcttggcaattcatggggcatctgaagctttaccaggttgtcctcaagttatcaaccattagataaacacaggcaggtactgtctgcttctctctctctcacacacacacacacacacacagtcccatttgcatatcacccttccctgctcccaccaccagtgagacaagctgaagattaggcacacagatcccctggaaacccacctctctggaaggccccttccctggcaggtggccaggcaggcgggggctgctcagcctcatcctgagagacctgccctctctgcgctgaggcccagcccctccagcaccactttggcttaaagcatcctcctcctggactcccctccctgccgaacacacatcccaggag

SEQ ID NO: 16502 - DNA, 3177 bp, Homo sapiens
ggtgctgcccgtggaagccagggagggatggaccccgaaaggagaaaagtactcccaggaaacagacgcgtgaaaactgagccccagaagaggcacacttgacggcacaggaagtcactgctctttggtcaatattctgattttcctctccctgcattgtttttaaaaagcacattgtagcctaagatcaaagtcaacaacactcggtccccttgaagaggcaactctctgaacccgtctctgactgttggagggaaggcaaatgcttttgggttttttggtttttgtttttgtttttttttctccttttatttttttgcgggggagggtagggagtgggtgggggggaggggggtaaggccaagactggggtagaattttaaagattcaacactggtgtacatatgtccgctgggtgagttgacctgtggcctcgcacagtgattctgggccctttatgcttgctgtctctcagaattgttttcttaccttttaatgtaatgacgagtgtgcttcagtttgtttagcaaaaccactctcttgaatcacgttaacttttgagattaaaaaaaaaaacgccatagcacagctgtctttatgcaagcaagagcacatctactccagcatgatctgtcatctaaagacttgaaaacaaaaaacagttacttatagtcaatgggtaagcagagtctgaatttatactaatcaagacaaacctttgaaaggttacactaagtacagaacttttaaaccttgctttgtatgagttgtactttttgaacataagctgcacttttattttctaatgcagaggatgaataagttaaatacatgctttgaggatagaagcagatgttctgtttggcaccacgttataatctgcttattttacaatatacacgtttccctaagaaatcatggcagagatgtgagggcagaatatacacaacagatgctgaaggagaaggagggtagtgttttgcaaaagaaaaagaaaagaaccaacagaattttaactctattaacttttccaaattttcctatgcttttagttaacatcattattgtatcctaatgccactaggggagagagcttttgactctgttgggttttatttgaatgtgtgcataacagtaatgagatctggaaacacctattttttggggaaaaaggtttgttggtctccttcctgtgttcctacaaaactcccactctcaggtgcaagagttatgtagaaggaaagggagctgaaataggaacagaaaaatcaacccctataactagtgaacaccaagggaaaataccacaatgatttcagaggagactctgcaaaatcgtcccttgtggagaatgcaggcaacatggaatactaggaatgaaatcacatcactgtatcttttacatcaatagcctcaccactaatatatcttgtatctaggtgtctataatggctgaaaccactacatccatctatgccatttacctgaaaacttaactgtggcctttatgaggccagaaaagtgaactgagttttcgtagttaagacctcaaatgaggggagtcagcagtgatcatgggggaaatgtttacattttttttttcttcagaagtaacgctttctgatgattttatctgatatttaaaacagggagctatggtgcactctagtttatacttgcgctctgaaatgtgtaaacatagggtgcctacctatttcacctgacccatactcgtttctgattcagaatcagtgtgggctcctgcagtgggcgcgggtcacggctgactccaacttccaatacaacagccatcactagcacagtgtttttttgtttaaccaacgtagttgtattagtagttctataaagagaactgcttttaacattagggactgggagcagtccatgggataaaaaggaaagtgttttctcacgagaaaacatgtcaggaaaaataaagaacactttctacctctgtttcagatttttgaaacacttattttaaaccaaattttaatttctgtgtccaaaataagttttaaggacatctgttcttccatacgaaataggttaggctgcctatttctcactgagctcatggaatggttctgcttatgatactctgcacgctgccttttagtgagtgaggagtttggggttgcctagcaacttgctaacttgtaaaaagtcatctttccctcacagaaagaaacgaaagaaagcaaagcaaagtcagtgaaagacaatctttatagtttcaggagtaaatctaaatgtggcttttgtcaagcacttagatggatataaatgcagcaacttgttttaaaaaaatgcacaatttacttcccaaaaaagttgttacttgccttttcaagttgttgacaaacacacatttgatattctcttatatgttatagtaatgtaacgtataaactcaagcctttttattctttgtgattaaatcctgttttaaaatgtcacaaaacaggaaccagcattctaattagatttactatatcaagatatggttcaaataggactactagagttcattgaacactaaaactatgaaacaattactttttatattaaaaagaccatggatttaacttatgaaaatccaaatgcaggatagtaatttttgtttacttttttaaccaaactgaatttttgaaagactattgcaggtgtttaaaaagaaagaaaagttgttttatctaatactgtaagtagttgtcatattctggaaaatttaatagttttagagttaagatatctcctctctttggttagggaagaagaaagcccttcaccattgtggaatgatgccctggctttaaggtttagctccacatcatgcttctcttgagaattctatttggtagttacaattacagaaactgattagtttgtcagtttgcagatagatttagcacagtactcatcactcggatagattgagatgttctttcacatcagatgatctgtaacactgtaagatactgatctttacaactgtttaatcagttttatttttgtacagtattagtgacctaagttattttgctgtcccgtttttgtaaatcaaatgaaattataaaagaggattctgacagtaggtattttgtacatatgtatatatgttgtccaaataaaaataataaatgataaagactg

SEQ ID NO: 16503 - DNA, 905 bp, Homo sapiens
accttcttaatatccgccacagaaggctcaagaatccagccctaaaattctctccaactccagtttttcccctttccttgaatcatacctgctttattcttagctgagcaaaacaagcaatgctttgggaggtgttaactcaaaggtgacttctgggccacagatcaagaaagcatttgatctgacccagtgccagacacaggggatttaaggcatgttcacacttgctgggcagggagggggaagagagggagaaggaagggttagagatgaatgtgtatccgcagtcacagcagaaagccatgagagcaggggaaacaaggggcttcgagcacgctccatgccaggaggcatctgttgatttctgaccattatcaagagttgtaggatgcagggctaaattgcaaaataaaataaaatagccagcgtacacaatgagatattctaaacttccattctgttttcttttcacattggctccatcactggtgactgatgaagagcatcctctttattcagtataagccggcagcaagcagttctacctaacgtcccacatccttctcatgccaacacttctgtaattgatcattataaagaaaaaacaaggtaacagtcatagttcacctgtctcttatctattcacttctggtgccacaactgtttatccttttttgaagaaaataagggaacagaaatgcctttttgtattgcaatcgaaatgaaagaagagttgatgttaaaaaaacaaaagtcaagtgatttattatatacagtgggcgttcaagtctagtcgagcaagctcaggagaatgtaattaaataattttatattttttaatttattttgtatctcacctgtcatggatgaattcattcactgaatatgtaatattgaacttaaaa

SEQ ID NO: 16504 - DNA, 233 bp, Homo sapiens
gtaactttccaggccccatggaagaaccctaaagcctgtttggaaacgagggtatgagtggattatgttttcagtagctcaaccaagacctcaaatcaaaacaagctatgaacaaattgtctaaaaaatgtctgtcatgggagggctgtggtgaagaacagagaaacatattctaaatgtcctgtgaagtgggaaattctatgaaagctacacggataataaaaagggtgagg

SEQ ID NO: 16505 - DNA, 1830 bp, Homo sapiens
agactaactgtaacttaagtgctgggggaaaaaaaatgtgaactaacttatttaatttatggcattttaaaatgacactgttaacccaacggaaccattttccagtttgatacagaatggggagaaaagaaagcgtttgaaattattgcttggataccagcttcatgcaccttctagttgtacaaaatgttaaagacgttgtttgtatttgtaaggctggtgtattcagagagcagatctcttattcctcactttccacccccgtattttgtaatgaccatgagcaatgtttttactttttgtataatggggtggggtggagtgggggcttctgagagtcagcctgaggtctttagaggaccagctattgtagcaccttggatacttgaagtttaatgctcagttgggtcgggtggcagttgacttggtggctggcatgttcagcagtgcctggggccctgtttctgggcagcctttgaggattttctatgatattgaatgacagttttaagtggcaactcaggcccagctcatgcccttttttgcctggacatgtgctatttttattcacttatatatcaattacttgtaagggttaaactttcaaacaggaagtatattgggacaaaagggctcttggggattagatatccctttaatctgtgaccattgggcaaaaaattttcctgcagcaaaagtctgaggctgttgggaccatttttgcagctttaatccttagcctcttttgactgtatatttgtgtttaaaatgcagagctcaactgaatatttccttttttgttttgttttgttttgttttaagaagtaggttgttttcctgaaccgtaaacttgtatcattttaacttgcacaaaggaagtctgttcttggtattgctcttgcacttgggttttttgttattgttttgtgtggattttttaaagcttttctgttcaccctcctgccaggaaaatcccagaaagcttaatgataccccaaaatgattacacccagggaggaaaaaaaggagcgctttctagggtcagaatcgtggagagaatactcagaaatgaacctctttaaagccttgcaggaatgagtcactcttacttaatgaaatgttaaagccaattaaaaagcatgctgtgatgcccagcttccctttccacagggtgcatgcgtctcctgctggtgaatcacatgcggcaagaggcaactggctccacagcctgggatgctgccgtaccaagaggaaagaagcagcaaaatgcctttacgttgttctaaacccccgacgcataaagtgtagaggagggatggccaagggtgggtggtagaaagtgtgttcaggctgacactggcaatgagtacagataatttcactttcctcttctaggggcaaaggctgatggcctctacctttgtatccaggagaaactgcagagcagccctgtgactttacaaaatatgctacctcaaagtgctaccgataaacctttctaattgtaagtgcccttactaagggcacatgtcttaatcaaagttagttttttgttttctggtttgttttttttttttgtatattgatgaatgagatcttacctattaaatatattattggattatggttcctgaaggtcattagagtgtgtgtgtgtgtgtgtgtgtgtgtgtgtgttttatgacttaaatatctttacgtgtgttttttagagcttggttctttaaagatttggagaagatatgtaaattaccaaggcacttggtttttctgttttatatactaataatcagggcctaagttaaataaaaatatgtgtgcatgtatttt

SEQ ID NO: 16506 - DNA, 1634 bp, Homo sapiens
aatattctgtaaatttgctactgggttttcctttcttgctgaactgcactctttggtaaataacataaaacctgaaggttttgtttgcaaatcatgtcagttgccttcataaatgtacaggtaatgatttgttaacagacttaatgaaggttttaattaccagaactaaaaactggaaataacagtaccgtgcagtcaggctgtgtaatttatattttttctgtgaatttttttttaacatcaagatgagtactgtatgagattttaattctataaaatcaaatgctgtaaaagtattgccaaatgcttttgcatactagaaacaaatttataaatatttttaaaacatctcaatatattaaatcttatcctggaatacaactgtaatattttgaaaaaagctatgtatctaaagcaatttaagtactcataatggaatgaactgtaaaagagatttaaaaccatgcaagttcactagaattaacctaaaccctgttgtacagggatagaggtttaaagttattttattgtaaaatacattgaattttctgtatactctgattacatacatttatcctttaaaaaagatgtaaatcttaatttttatgccatctattaatttaccaatgagttaccttgtaaatgagaagtcatgatagcactgaattttaactagttttgacttctaagtttggtactgtgaggcaagtacttaaaattttcatgctggttacttaaaaggcatttagagatttcaagaatgattttgtatacgatgttttaaattttgactgatctcatagtcttcatagaattgcagtagtcttcattgtatgaaatcccgaaagtccatgagttgatcttaaagaccactaacagactggctatcagatcccttttcactttggctatttttttcattttttgagatggagtcttgctgtgtcactgaggctggagtgcagtggcgcgatcttgattcactgcaacctctgcctcccgggatcaagtgattctcctgcctcagcctcctgagtagctggtattacagatgcttgccaccacgcctggctaatttttgtatttttagtagagacagggttttgccatgttgatcaggctggtcttgaactcctgacctcatgatctgcccttggcctcccaaagtgtcggaattacaggcatgagccactgcgcctggcccactttagctatttttaaaaataggacctattgttttggattactatctgagaatttcatggattcactcctgggtataggagataagaatacgtttaattcataacttttatattaaccaatatagtaaaaaaataaagctcacacatacaaaaactaagttgcctttccttgaatgaaccctgtctgaataaaacaatgaaaaataaaaataaaattaatggtatgtagtctaatttgtaaatgaatgaatatggaaataatacacactgtggatatattttaaggccttatgtagttttaattgttctgctcgttccgtggttatgtttaagactatagtatatgactctcttcaaagtatatcaagtattgtgaatgctttggttcagatgtgtcaaattaacagtaaaacaacaaatataccactg

SEQ ID NO: 16507 - DNA, 127 bp, Homo sapiens
ttttctcaaggtctacagttttcaatgacggtactatgtattccattatcttctctttaccaaacttaactggattaatataccaatgatcctttcaaattatatgacataaacttatttgctctcc

SEQ ID NO: 16508 - DNA, 1494 bp, Homo sapiens
attacttcttgtgaagagactgaaactttgtttttattttaatatatcgtaggaaaacattaaagagcagatgcatggccatttttctttgatgttctccagagttttacattacacttgtctgtcttataattgatattttaggatgtttgggtgtttgttacaggcagaattggatagatacagccctacaaatgtatatgccctcccctgaaaaaaattggatgaaaatctgcacagcaaagtgaaacacacagataataggaacaaaatgtagttcccatgtgccaaacaaaataaatgaaatctctgcatgtttgcagcatatctgccttttgggaatgtaatcaaggtataatctttggctagtgttatgtgcctgtatttttttaaaatggtacaccagaaaaggactggcagtctacttctaccatagttaaacttcaccctctttaatttcacaacatattctttggaagcaggaagaaatgctcataaagaggatcagaccttctttcccgtgaaaccagtatttggcgccatatataagcctggttaaattggtcatctaaagctgtcaaataagacattctgtgaaaggtaaacatcgaaactggttataagtaaaaccatcaagccaacaacagggtcttgagataacctttgaagcttattgtactggcctgcaccagaagatgtctgcattactcattgctaaaaatgtgtagcacagaactgcactaggattaatttgtttacaagaagaaatttaaactctacgtttggttttcacatacagcagctctattgaataacatgcatctgaattttaagttgcaaaggtatctgaataatttttcatgtgcatcttttgtcgaatgttttggttcaagaaagaatgtttaaagctttttaaaagacttcagttcttaatgtaactgtacccttctgcatggaaaatcataaccaacatggctgcagtagacttcttagtggtatccagcaccacttgcagagggctgctttatcatattgtacttgggtgtaggactctagtgttcttgggtgtattgcatgggctgcattatctacagcattgtacaataacaactagaaaaggcagtatacttcactgatgcttgtctggtaataatcacttctgtgttataatggaaggttttttgtgatgtatgaaacttgtgttttttatatataaatgagtatagttagtgttgtggtaatgcctgttttcatctgtaaatagttaagtatgtacacgaggcactacttctgatttattgcaatgttcagtcctagtttttacttttattcttaaagcattcagttttgctttcaattttatgtaccttagttctgagttagacctgcagatgtgtacagatagttcatatttatgtattgcacataatcatgctattcagcattgatgctatattgtattatgtaaataataaaagccatgtacagagggaa

SEQ ID NO: 16509 - DNA, 536 bp, Homo sapiens
agaaaatacaagagtggagagaagctcttcaatagctaagcatctccttacagtcactaatatagtagattttaaagacaaaatttttcttttcttgatttttttaaacataagctaaatcatattagtattaatactacccatagaaaacttgacatgtagcttcttctgaaagaattatttgccttctgaaatgtgacccccaagtcctatcctaaataaaaaaagacaaattcggatgtatgatctctctagctttgtcatagttatgtgattttcctttgtagctacttttgcaggataataattttatagaaaaggaacagttgcatttagcttctttcccttagtgactcttgaagtacttaacatacacgttaactgcagagtaaattgctctgttcccagtagttataaagtccttggactgttttgaaaagtttcctaggatgtcatgtctgcttgtcaaaagaaataatccctgtaatatttagctgtaaactgaatataaagcttaataaaaacaaccttgcatg

SEQ ID NO: 16510 - DNA, 2118 bp, Homo sapiens
aaagggaggagcaagaagatcccagtgcttgccctgcctgccaggaactctgtgataacatagattgatcaacgtgatgttgattacatcagcgtctccttgggacacgccttctgagcctcacatctccttctgttcaaaggcctcattggtatatgatcaatgggttctcctagacactgacctctgtccagggcactttgcagctccatcctcaagttccacacgaagatgcttggatgagtcagctgggaatattgttcttgtgtacctcattgctttagctggtcacttggaactttggagcagaatcctgcacattaaaggatggggttgggggggatacatttattttattttctcactatgtatgcagactggaccccctactactatttgtcacctcacccacagattgtatttatgtctatatatatgttcataaaaagttatgtgatttcctcctctgtcttttccacaacataggactttgaatagcaatgataggaaaaacaatggaacaagggtgggtttgcacagattggagcacattcctgcacaaactaccaagtatactggtgaaatctcgatgggtttcagatattgtcagtgaatcatatgatgcctggatatttcaggtttctgtaaaagaaagggaaacctaaaacaaatacccttccatatataatatatatggaatatgtatattatatatatttttatatatataatatatatggaatatatatattatatatataaaatacatatggaatatatatattttatatatatatatatatatttttatttttgagatggagtttcactctttttacccaggctggagtgcaatgatgcgatctcactgcaacctctgcctcccgggcttgagcgattcttgtgtctcagtcttccgggtagctgggactacaggtgtgcaccactatgcctggctaattttgtatttttagtagagatggggtttcaccatgttggccaggctggtctcaaactcctgacctcagatgatccacctgccttggcttcccaaagtgctgggattacaggcgtgagccactgcgcctggcctttttttttttttttttaaacgagaacaagaatatgaagaactggaaatcattaagaaagggtttcccttccttaaagctcaggggtactattagttaggagttgactaactcaacctgtaaaacaccactcctccttccaaagttgtatatataatattgcaggttaaattactttatgtcaggtcctatgaagaaagatacggtttcagactgaaaacatgtttcacaggtgtttgcttccttccagagcagagttccctattcccctggcataaagaatgtatatatattttgaaatatggctgagaacatgtcattggtttgtgaggcctaaggtgaagcactcctggcagccacactgtgtagtgtatttgagggatcagtcatccctcttgtatgctgggcctggttgccctacctcgaacaagcaccagcttttcacacaaggagagatgtggggctgggagtcctctccccatcctattgcatctcctttcttattataagctgttccagttcacaggcagcaaacctcctgggtttgaaaaattccaacttatttttatctttaatcctgacattagctgacttgctagtgagcttgctttaaaaatctacactcttgcattcttaggcatacaggggaaatgttgaaaaggaaggtggaaaaccaagaatttagtttgccaatgattgcctctgattcttgtaagtttgagttccacaagggctaatttattccccttttacttgggttttggggtggtggaaagcgggaaatttgggtgatttgttgattggcaatgaggataaaatgttaatacttttttggggacttaacaactttatcctattctacaagtcagtaaaggaacaattggtactcacctcagtgctgcactcaactatggaaagaggcagagtttgcttgcccaattgccaaactaaagacatcagttcattggtcaaatatttgttacctggaatggaacttgaaagcaaatacatttggatttcaaatttc

SEQ ID NO: 16511 - DNA, 1086 bp, Homo sapiens
tgtaaggagccgaagcagtgggattggctgatttgaggagatgtctctaagtgaattctcgtattcttaagggaaaagttattttccatacttgaagttatatttccaaacctgagaaatgaagaaagattgttctgacattaaatacctacagttactactgaacctcttaataaggatttgtcaaggatagagtacagttgtaggggaagtattttatgtatgcattcttagagcaaaaagttttgtttaaattctagaattgaaggtactgatcttataaaaagaaattctagcagttttagaaataggtgggaaaaactcaaatattcctcctatctgcaccaaaaagtttatttgtggtatataaaatgaatattgttttataataacttgttaataaagtactttctaatacattctattgactctgttagttgaacaaatagctgacttgaacatctatgcaaacttaagatgggcgggattgttgtaaaagctattgttttaaaagagctttctaaatgtaaagtagtgataatttcaatttgggtagcgtgtttgcaaagcttccaatatttgatgttggttaagctctactatgggcaactgaagatggataaagaaaaatgaaaactgaatcggtgcctgcttccccctgttttcccaggattagaggaaaaaatttattgtataatcagcttcttggttttgaattgcttcgaggcatggttttattccttattactttagacctgtagttttcaacactgacagcactttaaaaatctttgcctgggcctcactcttgagagattctcatttaatagttctgaggtgggtcttggatataactatttttttaaacacctgtcctgtttccctccattcctctcatgtgcagacagggttgagaaccagtagactaatggtcgtttttcctgtttaaaggagataactaatttgagctgaagcaatgcttcttaattagctttgtttttgttttgctctgttggtggctttgttacaactgaattattgtgttattactatttcattgttaaagaaataaagtaagcaatttgt

SEQ ID NO: 16512 - DNA, 808 bp, Homo sapiens
tggtctcaagtgataccacctggaaaaaagtttagtaagaacaaatgctgaaatcaacgactcaaaatcaactatcagtgatgacaggacacaacctcaaatcagtggtgccttcttattcctaacgaaatttagaaatagtgtctattttcttaatatgtctattgctttttcagaaatatactatgccatgcagatttgtactacacaagtaaaaatggaggaaatgtcttgaagtatactttttccttgaagcccagaattgtgtttcagtaggaaaaaaacctaatctccagtgtcttcatgatgctgtccattgcaagtctgccgaattaatgactaatagtattgaagtacataataatcttcctttttttgttgttttgtatgcattgcacatgtaacttttagaagagtctaaggatcctcagtcatattcaacatctggagttgggactttgttcactttcaatctaagaaaactatgcgtaaaatatgtctttttttttttttttcttcagagacaggatcccgctctgtctcccaggccggagtgcagtggcacgatcatagctcactgtaacctcaaactcctggactcaagcgatcttcctgccttagccttagcctcctgagtagctaggactgtaggcatgtaccaccgcgcctggcctgtgtctattttatcattcagattaatttaattttgtattttctggctcagatgaacttaaagaagcatcaaacatttcttttttatgaaatgttaaatttaatagcatcacaggccggtaaaatatattcaagt

SEQ ID NO: 16513 - DNA, 346 bp, Homo sapiens
agacggaacacaacaaatccttcctgaagtgaattaggaaactccaaggagtaatttaagaaccttcaccaagatacaatgtatactgtggtacaatgacagccattgtttcatatgtttgatttttattgcacatggttttcccaacatgtggaacaataaatatccatgccaatggacaggactgtaccttagcaagttgctccctctccagggagcgcatagatacagcagagctcacagtgagtcagaaagtctccactttctgaacatagctctataacaatgattgtcaaacttttctaactggagctcagagtaagaaataaagattacatcacaatcc

SEQ ID NO: 16514 - DNA, 1882 bp, Homo sapiens
tgaaaaattgtattatttattcattcactgttttctagtgtttctgtgtttattactgttcagcatcatcttggttatatactgaaaatcaaacactttactacagttgtgaattagtttaaaccgtacaatgttgttatcatatcatgcttcaactattaaattaagcccatcatatcatagcactaaaaagattgagttaaaaataagatttaaaaaatatatattgattaaaatgtaccactagaaaggtattacatgtgtataagtatgggtaaaaaggcaagtcactagtttgagatgaaaactaaaattttcatggtaaaatgccagcatgtatgtacttgtgtagtgtgtacttctaaacagagaaggcttataaaagtaaatgcattaaggccaagtgcagtggctcacaccggtaatcccagcactttgggaggccgaggtgggaggattgcttgagctcatgagttcaagaccagcctgggcaacatagcgagactccatctctataaataaaaaaaaaggaaatgcattaaatagaaggttgatagtttatcataaacctgcggggaagaaactcagactttctatttttgatattttgtgcattaatacattacaaacatgaagatgtttgtaaagttttgttttagtcattttctttgcagtcacatcattgtaccaccttcattattgtatagagctgcttcaattctgagtcctctggacttcccctgcctatctgtttgttgttgttgttgaagacagtaaaataagtgttttcaaatctatatgtctcctttttgttggataatgtttcttctttttaatggtaaatattcttgttcttcaacatttttctttggttcttttttccttttttaggaaaaacaaaacaacagacttcatccttaggttttctcaagatttaagtgaacacatttacacatatcaatttcttaaagaacacaaaatgtttcctccctagcaaaactatttaagagccaattaaactatgaaatagttataaaattatttttaatatttaaggccttgaaattatattccaaggcaaatctaaatgggtgtagttgtatatgcacgatgtaatttaatgctaaagagtacttacagcttgagggaaaagcataaagttttagttaaatagccttcatactgtggatttttcctcctactaactaatatgtgggaaattaagattacagatgctttgggccccctcaaacagtacattgctacagttcactgtagcaacagatttggtggtgatggggggatagaggtagaagcagatagaaggtaattttaaagttaatttattatgaatcattttcccctaatctgcataaatgaattagaactgattttaataaaaatattctgtgtaaaaagtactcagaaaaacatctaaagctgttggagaagagggactcatataaatagttggattgcgttttgctttttatttctttataaaaatatgtcaaaaacagtttttaattttagaaatcttatacttgaaagaaacctcaattatcagtggctttatgaagtaaagttaaaaacaaacataggaaatgtgaaaatatttgtgtttgttttgtctgactaacttgctgctaaatgctatctttaggtgtgtgaaagttctttgatatgttattgtccttttacatcttgttaaatagccattgcttttgagaatcagatagtgtgttgtttaggggttaattgtgtctatatctttcaaaaacttttatattatgtattataagaagttacagtagtaccattttgattagtctgaatgttttcaggccttgaaataaattttgactaagtgatattttttctt

SEQ ID NO: 16515 - DNA, 344 bp, Homo sapiens
cattgattgatttcccacaattgcagtctgagcaactggaatgtaactctctccattggataagtccatgatagtcctttgcttctttgtgatacatttgacttggaatatagtggcaggttattatttgggtgaaaacactatgctaagtcaatgaaaaatgccaaacctggattctcaagatgaatgctctttcattcatctcagtaaaacaaagcctaaaacaaacactcagatgtgggtgtatatttaacctgtttaatagcaattatgatatgtgtgattaggttcacttccatattttctgtgtaccaccctgtattgttcatagaacttttcttaaa

SEQ ID NO: 16516 - DNA, 346 bp, Homo sapiens
aagctgctgcccactcctcccctataacagaagatgtgatttgcaaactccttgttttatttgcaagtgcttctgacatcaccagagccagccccatgccaggaactaaggatgtcatgtagatcgtggggacagagatgggtgatggaacttggaagatatttgagtttaccaacatactttaaaagtccttacatcccaaattgtgtttataattattttcttgacttttggctataagattttgtgtaatttttgaatttggtgttttctagaatttttaaaagccactttgatttagttttaaatatgtttaaaaatagcgattaaaattatgtaagcaagg

SEQ ID NO: 16517 - DNA, 1042 bp, Homo sapiens
ttgtgcctcctagacacccgccctgcccttccctggtgggctattgaagatacacaagagggactgtatttctgtggaaaacaatttgcataatactaatttattgccgtcctggactctgtgtgagcgtgtccacagagtttgtagtaaatattatgattttatttaaactattcagaggaaaaacagaggatgctgaagtacagtcccagcacatttcctctctatcttttttttaggcaaaaccttgtgactcagtgtattttaaattctcagtcatgcactcacaaagataagacttgtttctttctgtctctctctctttttcttttctatggagcaaaacaaagctgatttcccttttttcttcccccgctaattcatacctccctcctgatgtttttcccaggttacaatggcctttatcctagttccattcttggtcaagtttttctctcaaatgatacagtcaggacacatcgttcgatttaagccatcatcagcttaatttaagtttgtagtttttgctgaaggattatatgtattaatacttacggttttaaatgtgttgctttggatacacacatagtttcttttttaatagaatatactgtcttgtctcactttggactgggacagtggatgcccatctaaaagttaagtgtcatttcttttagatgtttaccttcagccatagcttgattgctcagagaaatatgcagaaggcaggatcaaagacacacaggagtcctttcttttgaaatgccacgtgccattgtctttcctcccttctttgcttctttttcttaccctctctttcaattgcagatgccaaaaaagatgccaacagacactacattaccctaatggctgctacccagaacctttttataggttgttcttaatttttttgttgttgttgttcaagcttttcctttcttttttttcttggtgtttgggccacgattttaaaatgacttttattatgggtatgtgttgccaaagctggctttttgtcaaataaaatgaatacgaacttaaa

SEQ ID NO: 16518 - DNA, 513 bp, Homo sapiens
aaacattatgtggtttaacgtttatagttgaattgggccaaaatgtttcgaatttatagaaatagaaaagttgtaactttaaaagagaaaaaaaattacaaacacctgtttccaaaccttgacagaaaactactttgagtctacaaagaggaggcgacaagtccatcagcagaaagtcacctgtctacatagaccaaatggagcaccaaggccaagcggacagaggggccatgggttgtaggattgaggaacggaatctgccgactcacatgacagcccattctttctttctgggtgatctggggatcacgccttgcccaagtgtgagattacctttctgttccttgcagttcacctcactttccgtcctttgtagagcagtggtgtctccaatgaacttgtttcctggttttgcatcttgtgaaatgtttttttgtatttttgttgaaggttaaacatttgtataaattgtaaatatatttggtttattacagtaaaggctttagtaccaat

SEQ ID NO: 16519 - DNA, 270 bp, Homo sapiens
atcccaaacatccttggcctgtgaagtcttcatttccagaatactgaatttgtgtgacttatttggctcttaacagagtggcacatcctactgacactgtcctatggagagttacagtgcaggaaacctgaacccagctctcaggtccctctggaactttggctcttctttgttttgtctcagtgagtgatttgggccctctggctaaatagactagtcatgtccttacaggtcttaaaagataacatgtaaatgtttttaaaatggtaa

SEQ ID NO: 16520 - DNA, 521 bp, Homo sapiens
agttaatctctcacgtgactaagggctatattcaatgctagtgatttctttttttcagcaaatgcctggttctgaagggtcacggggctgtcaacaggtgttccttactcataattgattattcaaacctttaagttagctttccataattcactgcacttaaataagtttaaatcaaatacagttattttagttacaggttaggaagatggtctttaaataaccaaaaatatgtttattttttattatagtgtagacatacccttcatctattatatcataatacatgttacattggactgaattagattttcccatttctaatagttggcaccattataagctataaggttcagaatcagaattttagtaacaactcaagagaaagttgttgaatataatccttagtgaaaacagtgtcctctaaccaatgcctatacaactaaatttatgctgggtttttggttctgtttttttaaaaatatttttatgtgttcaaactattttggtaaatttttagc

SEQ ID NO: 16521 - DNA, 1230 bp, Homo sapiens
tgcaagatattttttcttttttatagtgtgaagcagtattctggaaagtttttctaagactagtgaagaactgaaggagtcctgcatctttttttttttatctgcttctgtttaaaaagccaacattcctctgcttcataggtgttctgcatttgaggtgtagtgaaatctttgctgttcaccagatgtaatgttttagttccttacaaacagggttgggggggggaagggcgtgcaaaaactaacattgaaattttgaaacagcagcagagtgagtggattttatttttcgttattgttggtggtttaaaaaattccccccatgtaattattgtgaacaccttgctttgtggtcactgtaacatttggggggtgggacagggaggaaaagtaacaatagtccacatgtccctggcatctgttcagagcagtgtgcagaatgtaatgctcttttgtaagaaacgttttatgatttttaaaataaatttagtgaacctatttttggtggtcattttttttttaagacagtcattttaaaatggtggctgaatttcccaacccacccccaaactaaacactaagtttaattttcagctcctctgttggacatataagtgcatctcttgttggacataggcaaaataacttggcaaacttagttctggtgatttcttgatggtttggaagtctattgctgggaagaaattccatcatacatattcatgcttataataagctggggattttttgtttgtttttgcaaatgcttgcccctacttttcaacaattttctatgttagttgtgaagaactaaggtggggagcagtactacaagttgagtaatggtatgagtatataccagaattctgattggcagcaagttttattaatcagaataacacttggttatggaagtgactaatgctgaaaaaattgattatttttattagataatttctcacctatagacttaaactgtcaatttgctctagtgtcttattagttaaactttgtaaaatatatatatacttgtttttccattgtatgcaaattgaaagaaaaagatgtaccatttctctgttgtatgttggattatgtaggaaatgtttgtgtacaattcaaaaaaaaaaaagatgaaaaaagttcctgtggatgttttgtgtagtatcttggcatttgtattgatagttaaaattcacttccaaataaataaaacacccatgatgctag

SEQ ID NO: 16522 - DNA, 1823 bp, Homo sapiens
cagcatttctgtatcttgaaaaaatgtaatttatttttgataacggctcttaaactttaaaatacctgctttatttcattttgactcttggaattctgtgctgttataaacaaacccaatatgatgcattttaaggtggagtacagtaagatgtgtgggtttttctgtatttttcttttctggaacagtgggaattaaggctactgcatgcatcacttctgcatttattgtaattttttaaaaacatcaccttttatagttgggtgaccagattttgtcctgcatctgtccagtttatttgctttttaaacattagcctatggtagtaatttatgtagaataaaagcattaaaaagaagcaaatcatttgcactctataatttgtggtacagtattgcttattgtgactttggcatgcatttttgcaaacaatgctgtaagatttatactactgataattttgttttatttgtatacaatatagagtatgcacatttgggactgcatttctggaaacatactgcaataggctctctgagcaaaacacctgtaactaaaaaagtgaagataagaaaatactcttaaagctgagtatttcctaattgtatagaatcttacagcatctttgacaaacatctcccagcaaaagtgccggttagtcaggtttgttgaaaatacagtagaaaagctgattctggttatctctttaaggacaattaattgtacagacacataatgtaacattgtctcaacattcattcacagattgactgtaaattaccttaatctttgtgcagactgaaggaacactgtagtataccccaaagtgcatttgcctaggacttctcagcttctcccataggtagtttaacaggcattaaaatttgtaattgaaatgttgctttcactgaaaaagtgtcttgatgtttcagttatttttaatcgccataaaaaaatagaactatcttttgggtttatctgttttctcatgcacaggcaatacacaaatttaaaatgagttgtgagccaattgtttctgaagtgttttggtagttctattaagaaatagttaaatattgtgcttttcagagcctcagagaaagggggacggggtgggggggtggggcagcggaatctgtcctggatggggccagcttaaataatactggcaaccaagattctgttaggatttctgtgcatatagtgtagtaaagaagtatcattcaggggtgaaaaacaaagagccgttttaatgatgttgagtacatttggctgttttatagcctttttcttccctcccccaaagaattctgtttgcctaactcccaaactgttggggtggtacattcctttaggaccaattaaaacataattgagggtcagtgatacatttggctgactctggttcagtattctcttaggtgattatattctctcatgtacagttacaggaaattaaaatgttaaagtaacctaaaatgaattcagaccaataaaatcaagggaaatacaagttgattgcattacttctgtatgttgcttgctattaaaaaggttaagaggccaggttacccaccagtccttgcactgttctgacactttccccaggaggaaaacaagtacaaaggttacggtggaggcataagtagaagagattgttaagaagggtattcatgtgtctttgctctttctgctttatgcctcagtttggtttaaaaacttctgtactggcaaatggtggtattcagtgtgggatagtgtcataactaatttgacaatttattaatcataaaataacaataaatctctagcttttacacttg

SEQ ID NO: 16523 - DNA, 274 bp, Homo sapiens
ttacattagcctttgaagtcaacacaaagtttaaaacttccaggattttgcaaagttgtatatatttaatgctgtgcaactgctaaactatgcagtttttcttgaaggaactaaaagcaactagctccctaatggtctataattttatttcttttggcttaaagtgaaaaagaagaaatagagaattccagcagaattcagtggttgtctactatccatacttcttatcactttagtttttcatcagtcaataaaattaatttactcttccact

SEQ ID NO: 16524 - DNA, 301 bp, Homo sapiens
acattgaataatagaacttttagtagatatgtaaaaagattcctttttctaacctgttaaaaactaaagctcaagttcactacctctttcctcagaataaaggaagaaggggaggaaggaatccctaattcttttatatgctatagatgtgtacatcttctatatatatttggggagttttagtttatattcccatagtaatcaaacatgttttccaatacttgataacatttaaatatttataaatacgcttaaatgtttttccaggcatatttgaagattaaaactagtaatagactaa

SEQ ID NO: 16525 - DNA, 1197 bp, Homo sapiens
cctcaagtgtaaactgatccaaagaaaaccccctgcgttttatatcatatcatctgtacagttttgctttgatatttagagaacatgatcgaggttataggaaattgattgcccattctcacttgaaaaatacttcctaggccgggcacagtggtttatgcctgtaatcccagcactgtgggaggctgaggcgggtggatcatctgaggtcaggagtttgagaccacctggccaacatggtgaaaccccatctctactaaaaatacaaaattagctgggcgtggtggcacgtgcctgtaatcccagttacttgggaggctgaggcaagagaatcgcttgaactcagaaggtggaggttgcagtgaggcgagattaggccattgcactccagcctcagcaacaagagtgaaactttgtctcaaaaaacaacaacaacaacaacaacaacaacaaaacttcctaggccagatgtggtggctcatatgtataatcttagcactttgggaggccaaggcaggaggattgcttgaggcgaggagttcaagaccagcctaggcaacatagggagacccccatctctacaaaaatttaaaaattagcctagcatggtggcacgctctgtaatcccaaatacgcggtaggctgaggctgaggagggtggattgcttgagcccaggggtttgaggctgcagtgagccacagtcacgccactgcattctatcctgggcaacagatggagaccttgtctcaaaaaaaaaaaattcctgacatcgctatgtattcccaactttatcatttgtctgcctgtttagttttgacttatgttttttttttttcccccctgtggacatgtagttgacggaaatcgtgaaggaactttaatattttatttaaatttcccaaaactaatcatgccttatgtgactaatcttcagtgataatatttcatctactgatatattttcttgaggtgtgtaattttcagtataccttaatcatttggtataaaaaagagagaggtttttgatatatgaatgctgttcttgtaaaaatcaatcttgacactttattttaaactttttattggtaatgacagtgggttttgtacatcatgattttcaatttaggatatctgtctaatttgttttttcagagtaactatattggaattcaataaaaatattcaaaatttttctt

SEQ ID NO: 16526 - DNA, 41 bp, Homo sapiens
ggtcagccacttctccagtggaactctgaagtacagatgct

SEQ ID NO: 16527 - DNA, 569 bp, Homo sapiens
gcccgctgccatctcttgttaactgcaaagaataaatgaaatatcttggtttttatttcccaggaagcttgagagaaatgagtttatacagagctgactcaaaaagacaaaaagtaacttgggccagtttggtttcaagataataaatgtgttattaattaatgataaaattggcgcttgttttattttcgatattcaatgcactttatgtagcattgaatgatcaaatattggatttacctttaaaaaaaaaacctgagtatcattgcatgaatttttatctccctatggttatatcctgcatcaagtggataattttgaagtgtgttcagaatataaaattgaaattttagagttgttgaaaatcctgacttgttgaaaactaatatatatgtacatggatttctatagatgtgtttgtttagaagtgggtagatattgcagataagactgttcttcagaatcatgttaactattgggttgtgactgaagtagtccagggtttgccttgaaaccattacattctacatttaccaaattaaacaaataaaaactgtattaaatgttgc

SEQ ID NO: 16528 - DNA, 1672 bp, Homo sapiens
attgaactggaatcacatatttcacaacagggccgaagagatgactataaaatgttcatgagggactgaatactgaaaactgtgaaatgtactaaataaaatgtacatctgaagatgattattgtgaaattttagtatgcactttgtgtaggaaaaaatggaatggtcttttaaacagcttttggggggtactttggaagtgtctaataaggtgtcacaatttttggtagtaggtatttcgtgagaagttcaacaccaaaactggaacatagttctccttcaagtgttggcgacagcggggcttcctgattctggaatataactttgtgtaaattaacagccacctatagaagagtccatctgctgtgaaggagagacagagaactctgggttccgtcgtcctgtccacgtgctgtaccaagtgctggtgccagcctgttacctgttctcactgaaaagtctggctaatgctcttgtgtagtcacttctgattctgacaatcaatcaatcaatggcctagagcactgactgttaacacaaacgtcactagcaaagtagcaacagctttaagtctaaatacaaagctgttctgtgtgagaattttttaaaaggctacttgtataataacccttgtcatttttaatgtacaaaacgctattaagtggcttagaatttgaacatttgtggtctttatttactttgcttcgtgtgtgggcaaagcaacatcttccctaaatatatattaccaagaaaagcaagaagcagattaggtttttgacaaaacaaacaggccaaaagggggctgacctggagcagagcatggtgagaggcaaggcatgagagggcaagtttgttgtggacagatctgtgcctactttattactggagtaaaagaaaacaaagttcattgatgtcgaaggatatatacagtgttagaaattaggactgtttagaaaaacaggaatacaatggttgtttttatcatagtgtacacatttagcttgtggtaaatgactcacaaaactgattttaaaatcaagttaatgtgaattttgaaaattactacttaatcctaattcacaataacaatggcattaaggtttgacttgagttggttcttagtattatttatggtaaataggctcttaccacttgcaaataactggccacatcattaatgactgacttcccagtaaggctctctaaggggtaagtaggaggatccacaggatttgagatgctaaggccccagagatcgtttgatccaaccctcttattttcagaggggaaaatggggcctagaagttacagagcatctagctggtgcgctggcacccctggcctcacacagactcccgagtagctgggactacaggcacacagtcactgaagcaggccctgtttgcaattcacgttgccacctccaacttaaacattcttcatatgtgatgtccttagtcactaaggttaaactttcccacccagaaaaggcaacttagataaaatcttagagtactttcatactcttctaagtcctcttccagcctcactttgagtcctccttggggttgataggaattttctcttgctttctcaataaagtctctattcatctcatgtttaatttgtacgcatagaattgctgagaaataaaatgttctgttcaacttat

SEQ ID NO: 16529 - DNA, 1493 bp, Homo sapiens
aatctcaggactcttctggccgtaggttccaggaaagctcgtggaagctttggggctcactgcagaaatcatgtgactgtcacgtgctggaaaataaagtgatacatcttgaaaatgaatccagtgtgttggattccagaagaaatgatatttatattctctataggggacagaaaatgagaagccatcactctttttggatcatttaggtctcttgtatcctttgttttagaaccagtttcattaaagttgccttcctgggcacctgtttatccatttcctgaactgtgtgcactccttagatcgctattgatggcttgatcatccctcagcatttctcccaaccagatcggtgactcctaaaatctgagacaggacatcgtgactgctggtagtaatatggtggtgcattgttttttccacccaaacttaacatagcctttttatacatttttatgaaaaatttcattgtcagctgcctcactgcatactctttaatagtaccaggcaaagattttcttcaactatagtacagattagttctgagtgatggtatcaaaaggtgagaaagacgtcatccgcctttttttaatccatttcttttgccaccctatatgtctgttcagagatgggctctcaagctgactttgattcttttagttgagaagtctcttaaagccatctagcccacctccatcaattccctatgtgaggaagcaaaaccccagggaagccaaagggctcctgtccaccctgacaccacaggccgggggagagtagggactctacccccctctccccttgtaggtgacacatgctctgccctctgaggcagtcagcgaaggcaaatggtctgacttctttatgtggtcaacattttgatagaatttctttataatttgatagagattatattatttttattttattttgagtgggaagaattttaaaacctttttatgtcaattaccatcttgtttctttcacctttgaaacaatggtttgtagcagagatgacattgtagcaacccagaattatgcttttggaatgtggtcctcactgtacaggagaatgtgtaatcttttgttaaaattcccagtgtgcatacattttctggttcctcggtccagttgctaaagttcttagtattttagcctaacatatttatcaccaacttttctttaaaagtgttccttttgtcacttagttactgattttcctgggtttgacataagtattctatgagatgatatatatgctttttttgaaagctgattctcatgaattcaagtagctgagttcctttatgtttcgtttattcactaaagtagctgacacaaaacacaccaaaacctagagcggtagttttatgtaaatgctcatgagtttgtatcaataatataattgttgatccacttataattcgtgcaacactgtatgtatgtagagattgagttgtcaattaaaaaaaatgtggcctctttgtgatcat

SEQ ID NO: 16530 - DNA, 21 bp, Homo sapiens
ataaataaataaataaaaatt

SEQ ID NO: 16531 - DNA, 942 bp, Homo sapiens
gggaaggaaaatgcagcactctaaatggccactcaggcgttcctattcactcggaaaattaggttcatttcacaggacacagcagtgtagatcaggcttcaacttaacatttaagggaaatgtcagatttttttttaatttaatgaaattgttaatgaggaaaaatttttaatatagtcttatctaccacacatccccatagatttaaggattttaatagaaagacatgatgtatgtatttaagccacgttaaaagaaaaaatataactatggaccggtattcagtgaatacagtttcatggtttttaattctttcaaagcacattaaaaatggtgtgctgataaaccccaagtaaattaaccctttttccgtataaatccattttttgttttgaagaggggaaattatatttattgttgtttactgaatcctggtgtgaaagcatatcagatatgtatgaactgctactgctgtacttccgatttacggacatcattttattgctatttgtagacgtgataacatgaacatgagtacctatttatgtgggccttcagtggatgggcagtgccactcaggtctctggggtttccctctctaattttaagtaaattgacatataactactatgcttataaaaatgaagtaaggaaaacaagtagtcctgtttgccactaaaaacattttcaaaggaaaaataaaatgaaagtactttttactttttatgatactcagaaattaggatgaagaacttttaaaattgctgaagatcaaagaggttatctctgccagtcacaagtgtggctggtgtcattctgggtctgactggagccctcctggactgtttctttaatttcaaaagccctgcagacatagtacctggtcagaactatgcctcggtttatttatcattttgaaataaaatcagaatttcaacctgt

SEQ ID NO: 16532 - DNA, 1378 bp, Homo sapiens
ccctcgcgccccccgccgttggctgcgggagagcccgcgtcccactcccgtgctcgcctcgaccccgcgccgggcacctgtggcttgggacagatagaagggatggttggggatacttcccaaaactttttccaagtcaacttggtgtagccggttccccggccacgactctgggcacttcccctgaagctcctctccggagcttgacttcttggacctcctcccccgccccaattccaagctccagaaactcccaactcgtctgccgtccagaaagctagctgcagtgttcaggacgtccgggaggaagcaagcatgtgggggacagaacagtagtcctggactcgaaagggaaggtgctgaccagtggggccttagcaatttgaagggttgggaaggaggaattatatttgcaaaggggctgtctattagcatatttcctttgagggggcaaaaaaaagtgccagtatcgacttttacagattgtggccagtgaggatattataatcctatgtaaacagaaaagtcccacttaccgattcattctttcactgtttgtatctgcgcccagaattctcagtgacgtgggggtgagggtgggtggcgattgccttagagggaacccctaaattggttttggataagtttgagcccttgaccttaatttcattgctaccactctgatctcttagcacatttcttaggattaagggtccaaaaatgctgatctaaggggttgccatggtgttgaacaatgcaactttttatttaaaaaagctctgcactgccatgtatgaaagtctctttatgatgtttgtttttttgtcatttttgttctttacatcaagaaattttatgtttaaatatgcggagaatgtatattgcctctgctcctatcagggttgctaaaccctggtacatcgtatataaaatgtattaaaactggggtttgttaccagttgctgtactttgtatatagaatttttataaattgtatgcttcagaaataatttatttttaaaaagaaattaaaagttttaaactcacatccatattacacctttcccccctgaaatgtatagaatccatttgtcatcaggaatcaaaacccacagtccattgtgaagtgtgctatatttagaacagtcttaaaatgtacagtgtattttatagaattgaagttaacattcttattttcaagagaatttatggacgttgtagaaatgtacaaatgcatttccaaactgccttaaacgttgtatttttatagacatgttttttaaaaatcctaagtttttaaataactatggatttgtgtattttttttggttatttgttttattaaaacatgtacatcagtaaagagttttaaacaatg

SEQ ID NO: 16533 - DNA, 1021 bp, Homo sapiens
gaagttggccctggtcccgtctgcctgctcctcaggaccactcagtccacctgttcctctgccacctgcctggcttcaccctccaaggcctccccatggccacagtgggcccacaccacaccctgccccttagcccttgcgagggttggtctcgaggcagaggtcatgttcccagccaagagtatgagaacatccagtcgagcagaggagattcatggcctgtgctcggtgagccttaccttctgtgtgctactgacgtacccatcaggacagtgagctctgctgccagtcaaggcctgcatatgcagaatgacgatgcctgccttggtgctgcttccccgagtgctgcctcctggtcaaggagaagtgcagagagtaaggtgtccttatgttggaaactcaagtggaaggaagatttggtttggttttattctcagagccattaaacactagttcagtatgtgagatatagattctaaaaacctcaggtggctctgccttatgtctgttcctccttcatttctctcaagggaaatggctaaggtggcattgtctcatggctctcgtttttggggtcatggggagggtagcaccaggcatagccacttttgccctgagggactcctgtgtacttcacatcactgagcactcatttagaagtgagggagacagaagtctaggcccagggatggctccagttggggatccagcaggagaccctctgcacatgaggctggtttaccaacatctactccctcaggatgagcgtgagccagaagcagctgtgtatttaaggaaacaagcgttcctggaattaatttataaatttaataaatcccaatataatcccagctagtgctttttccttattataatttgataaggtgattataaaagatacatggaaggaagtggaaccagatgcagaagaggaaatgatggaaggacttacggtatcagataccaatatttaaaagtttgtataataataaagagtatgattgtggttcaaggataaaaa

SEQ ID NO: 16534 - DNA, 293 bp, Homo sapiens
cctggccagcactgctcccagcactgcgcaccaggtcaggaggacctggagtggactagaatcggggctgctggaactgggacagctgcctgtggctcagagccttcttcaaaagcttcaaaaggaaggcttcctttaaggtcaagtttcataaacttggttctgaatttctcatatgcatattaaaggtgtacatacctatacatcctgtacaaattatccctctatatttatattttttaagactaagaaagatgtaagactaatgttctgtgctgtatgtttttaatgaa

SEQ ID NO: 16535 - DNA, 801 bp, Homo sapiens
ccaccaggaaggagtccctgacaccgacctcaaccccaacaagaccctgctgccactgaccacagccacccccggagaaggcctggtcccccacaactgtgaactgtcttgcccaagcctgctctgaacacagccattgggccaccacctgatgggcagaggcgggacagtggagaagcctggaacccaagtgggcctgtgacaggaactaagacttaaaaaattaggtgcttacctgggacagtaagttctgtctggcacaagcaggtaaccaggatggctaacaggctttgatagctgctcgtgaactaaaacagcagggtgtgtgcaggttcctcctctacggtcaggcagcaggctctgaaggctgatcctacaccgtcccagtgactccccttgacagagtgcccccaccccctaatagccaacagggttagcatggccagcacagatcgctgcttttattgatgcaaatcaagcctgctgcttctcctccctgcagacttagccaaggaactccaagatgcatgactgggacaagaaaaggtgagactccacatggaaatgccttgccctaaaccttgaatgactgtgagatgcgatctgggagtgcatctgtcaagtctttgtgttttcttcactaacctcagaatactgggctctattttatcaagcgctgcagtttatgcctctgtcccgtcaatgctcagcttctgcaacaggacaccaaacttgatgcagaaagccaaataggtcaattatgcaaatctcctggtgccatattaaatttcttgacgatgg

SEQ ID NO: 16536 - DNA, 1467 bp, Homo sapiens
ggccggctgtgcatccccgctggtgcctcggctgcgacgtgtccaggcgtggagagttttgtgtttctcctgttcagtatccgagtctcgtgcagtgctgcgtaggttagcccgcatcgtgcagacaacctcagtcctcttgtctattttctcttgggttgagcctgtgacttggtttctctttgtccttttggaaaaatgacaagcattgcatcccagtcttgtgttccgaagtcagtcggagtacttgaagaaggcccacgggcggcacggagttcctgagccctttctgtagtgggggaaaggtggctggacctctgttggctgagaagagcatcccttcagcttcccctccccgtagcagccactaaaagattatttaattccagattggaaatgacattttagtttatcagattggtaacttatcgcctgttgtccagattggcacgaaccttttcttccacttaattatttttttaggattttgctttgattgtgtttatgtcatgggtcatttttttttagttacagaagcagttgtgttaatatttagaagaagatgtatatcttccagattttgttatatatttggcataaaatacggcttacgttgcttaagattctcagggataaacttccttttgctaaatgcattctttctgcttttagaaatgtagacataaacactccccggagcccactcaccttttttctttttctttttttttttttaactttattccttgagggaagcattgtttttggagagattttctttctgtacttcgttttacttttctttttttttaacttttactctctcgaagaagaggaccttcccacatccacgaggtgggttttgagcaagggaaggtagcctggatgagctgagtggagccaggctggcccagagctgagatgggagtgcggtacaatctggagcccacagctgtcggtcagaacctcctgtgagacagatggaaccttcacaagggcgcctttggttctctgaacatctcctttctcttcttgcttcaattgcttacccactgcctgcccagactttctatccagcctcactgagctgcccactactggaagggaactgggcctcggtggccggggccgcgagctgtgaccacagcaccctcaagcatacggcgctgttcctgccactgtcctgaagatgtgaatgggtggtacgatttcaacactggttaatttcacactccatctccccgctttgtaaatacccatcgggaagagactttttttccatggtgaagagcaataaactctggatgtttgtgcgcgtgtgtggacagtcttatcttccagcatgataggatttgaccattttggtgtaaacatttgtgttttataagatttaccttgtttttatttttctactttgaattgtatacatttggaaagtacccaaataaatgagaagcttctatcctt

SEQ ID NO: 16537 - DNA, 3396 bp, Homo sapiens
aggcccttcctgcgggaggagcagctgtgtgtccccggcacctcactcccccaaaatgacacccaccgtcgtcagggtagcatgtataatgcccacgtgttaaacattgcatttaatcgagatgcgtcctattgtccttaagagggcgtttcacaccaccaacagtaagccacccactctggagtcacagaatctgccaggcggttcaagtgaaaaccaacacactcagcatccctgggaactgagaggtgccagcaattgctgaaggtggcgatgaacacccgaaggtgggagggaggactggtacccacaaagcaacatgtaccgagaggactaaatgtcatctacgtgcatgtgagagcgtgttaacctagagttacctgcaccaaccccagacagaagccaatcacatctttgggggaggggaggggcaggaagaggtgagaagatcagatggtccaaagtggaccacacttggtccattttacacttttttaaaggggattaaaaaacacagcctctcccccaaagggtgtccgttcttaattcccacctggcctgttaggagccttgctaccctgaggggatgtgttcaccttacctagacctagttaggaagtatcattttaagctattagagtatttatcttcatgtgcagggataagtgcactaacagtgtgctgctctgtcggaagttcttcagtttttaagtgaggatatcgtgacagtattaaaacatcgcaataatgttcctgtgtgttatacatcgagggttttagaaatgtgattttcttcttttgacctgtgaggagtataacttctttcagccctcagattttaaatacaagcaaataaactcactatttttagacgtttttttcctccaaggtggttttcttctcttaaataactcgatctgtacccagctgggtagcagccagcaaaggccatcagacaaccagaagcacatccatttttgtagtgtcacaaacatgtatatgccacactttgcaccttaatgaaatactttgaaacagaagttattcactgtgtttttgatgatctatctgtattggaaatatgttcctggaaaatgcatttaaataatagtaaattctcttgcatgttccattatacgtgtcttctaagagctgttcaatacagtattcactctagaaacaattatctttttctcttaatgattttgtgtgcatctttaatctttcaagccaaattacagctatttcaggtttcctgtgttagcttggggataggatggtggctggagacaggcaggcttctctgccctgggaagagcccactcagcttaattgctctgccatcgtagagcctggttggacttggcttcctgaaaactcccactgatagtgcctgttagatctcctgtttgtttcagttggcagaacatttactggccccaactgtggcatcatcctctcagcagtcttcctgtcacccgcctggcaggcagaaggagctgcagtcccacgtgggcctgcctgggggggtgggggctgcatggctgttgggtggcagtgtcagcacagggagggcttaagttggggatgtttgaccaggccacctcctgcaactgctgtttctcctgtccctcctatgcagggcttgcagcagcagcagtgtggccatctccatcccccaaagcacacttgctctctcaatatgtcctagttttcttcagccttttctggttcagttcccttgtcctgatctcatcctctctggtctcccaataactcacccttgggatgtgtttagagcgtgggaggtgcctttgagaactgcttgactccatgatctcctagaacaaaaccgccctgactttacagggggaacactcatgctgagctgagaaagcagagaagtggcgtgggagccagctgggggtgaagagcatttgggccagtcccgtggcccccttcagattcctcaagcaggattgttctgttctaaaaagctgttgcacagcattcgcaatgagatctttagttggcggattttctggaacatttgtttttcaacttgtcccgacattttttttctgtttctattctgagagagagatgatcaagttttaatttgggtataggttaaatggaagaagaaacagaacttcatggccaaagtagacctatagattttgattgggttctttgttaacagtagaatgcgatctttgccactgactgtagtattaataaggttttaatgtgagatattcctgcaaaccatcccatttctactgattgtaagtcagaatttcttttatccctttcaaatcagtttctacatgtttaagtgttcagggcttcatcagcatgagaagtttgtaattactgaaagtctgatttcattcaggacacattttttccttcatattttttctgtgaatttataggctaggaaggctattgaagcctcaattatgggtcttcattttgagatcgttttctatgagctgaactgaggatatcaatggttatctcaaaatcgtcttttaggagatccccaattgactcagagtttgaggagttagtatcacagaattagatttttttaaagcatttgtacgtttccattcccaaatatgtagctgtggttcttgaaaacacatcctacattgcatatgggcatagcagtttttgacccaggcagaataagttaatatttaattaaatattgctttgaagatggcgctctgggcatgagcatggggctccatgacttcccttctatccccatgagcccctcctccatccagcgacaagccatgggcatgcatacaatgcagcaagaccaacacaagagcaatattgaattgttcattctatctaaaattacatgtatataaaatatataatttatcttcctgcatttttgaagtataaagtcataaattgtacatatctgtaagctagtatatttgtttcactgtttgtaatatttaagaaatgctcattctttgtagaacaaaaatgtattaaatattttaaaaattgctctgtgatacttaatttttttccccaaaatttgtaatgtgttgcttctacataagttctctggaaatatctacaactaataggacacatgtaaatccttgaagacacatcctggaattcataccccacaaggacagtgtgtatacaaagtatttgcagagcatgacttttatatgtgtgggatatcaatgtgtatatttatatttaaagtgtatttattgttacaagtctattctctattatattttatttactctgcggttataaaaatcacccttgcatacaagtttctagttgccagtgatgttctggaaataatgggagatattacaataaagctacagttatgacaccctg

SEQ ID NO: 16538 - DNA, 521 bp, Homo sapiens
aaggaacagaaattcttaagatgccaatgtaataaatgtacttcctggaagtgtctttcggatccactatatgcctcagcacatggaaccttaatgaccaaagtgaagagcagattattcatacggtgtaataagcatctggaatggacccatccgtgtacttcattcaaatgtgtaaatgtcatattcattcagatttataaagctagtagtgtatagtcagaaacagaatcaaagttagatatacatttttaaatatttactgcatatgaggctttctgttaattttttaatgtgaataatttatatattgcacattctagggaataatattgattgtatgtctactgtgctgcattaagaaaataaaatttctatataccaaaaatgtgaagttataccaaataaagtttctaagtgattaatgcatacgaacagctacatatacatatatctaaacctgaaaaatgaattgatattctgagtgaaaactacctaatataaataaaattagtgaaaag

SEQ ID NO: 16539 - DNA, 299 bp, Homo sapiens
attactactgagtaagagctgggcatttagaaagatgtcatttgcaatagagcagtccattttgtattatgctgaattttcactggacctgtgatgtcatttcactgtgatgtgcacatgttgtctgtttggtgtctttttgtgcacagattatgatgaagattagattgtgttatcactctgcctgtgtatagtcagatagtccatgcgaaggctgtatatattgaacattatttttgttgttctattataaagtgtgtaagttaccagtttcaataaaggattggtgacaaacacag

SEQ ID NO: 16540 - DNA, 1060 bp, Homo sapiens
gtggcaccagggcccggggttcggggatagaagccccgccgagaccccacagggacctcagtcacctttgagaagacaccatactcagcaatcacaagagcccgccggccagtgggcttgtttgcagactgggtgaggtggagccctgctcctctctgtcctctgacacagagagctgccctgcctaggagcacccaagccaggcagggggtctggcagcacggcgtcctggggagcaggacacatggtcatccccagggctgtatacattgattctggtggtagactggtagtgagcagcaaatgcctttcaagaaaataggtggcagcttcactccatgtcatatatggagtgaatatttcaaaacgttgggaataagggcctgcaaaaggcagcgaggaggcacctcgggtcttgaggttcctgacaaccgatctggtctgttggtttgaggatgaaggggctccatttctgctgcctccctgctgagaatattctccctttagcagccaaagattcgctggaacggaggctgccctctgctgcctgttggggtcggaagacaaggggcttctgaaatgggagttcctgagatacaacaaaatgtgtgccttcaaagaaactgacagctttgtatttggtgaaatggttttaattatactccatgtgtattttgcccactttttttgggaattcaagggaaagtgtttcttgggtttggaatgttcagaggaagcagtattgtacagaacacggtattgttatttttgttaagaatcatgtacagagcttaaatgtaatttatatgtttttaatatgccattttcattgaagtattttggtcttaagatgactttagtaatttaactgtttatgttacccacgttgggatccagttggtcttggtttgcttctctctgtaccacgtgcacatgaggtccattcattttacagcccctgttacacacagacccacaggcagccgtctgtgccccgcacacattgttggtcctatttgtaaatcccacacccggtgtatccaataaagtgaaacaaagc

SEQ ID NO: 16541 - DNA, 1320 bp, Homo sapiens
gcagagtcccgggaccatggcctcctgccacacaacacgcagagaggactcaagactcccgctggccatggagtggcctgaaagagagcaagaacatgtggatctttgataggattgttaccaaatggtgtcagtatggaccaattgtgtgaccatgagaaggatgcttattttttttaaaaagaaaacacatctaaaagcccaggaactgatttttttaagaggaaaactaatgacagtgtataactgatgtttaaattgtgcatttagtactatttaaatgttttcttatactagtattttatattcttttgttgtcgtttaaaactggagcttcagtgtctcttccctccctctaatagtaatggttcagtaagcactccttaactccttagtatttcatagaaaaatgactgcaacattaaagctaagaggaacacttcaacatatgtggtacaaatttatattgaagatctaaataaaccacgtattttccagtcttcgttgtgtgaagctaaatggtggctaaaaggaacactttttgtgtgattattataaactttgcattgtatttgaatcttagaacttttgtacacactaaatattgatgtcacaccatttctaatctgagcatccttagccagagaatattcattatacttcctaagtgagcaataatttaaatcagaagctattttattttaatgtaattaacctttctttacatttcttatgtgttcacctctaatctgttttaggaagagagttggttattatgttgatcccataatataaatcatatcctttatattttagaatatctcaaatgtattccttttttgtatggtgggtttgcctagggacgtgtaactacaggcttttactaagccaaggaaaaagagaatttttcttttcatcttacaaattccagatatctacaaaagatgtgaaagcactaaaaataccatttttaagcagtactttacctgttttttctttagcaaaccaggttatgtggtgtaaaggtttgttatacgtgccacaatatagcatataaatattatgccatcattccttctcttgttaaaggtagaagaataaaattgtgatttttataacctgtgcttattactcaaatggtcttcaacatctttttaaacaacacatactttttgaatgttcagtttctattttgcttgaggtattttgtacatatgtgccttgtgattgctgctgctttaaaggataaagtactctttgggggatgagtctggtttgttttgttttattttttaatgaaataaacctatattcctgatt

SEQ ID NO: 16542 - DNA, 498 bp, Homo sapiens
agatgaaggatcattgatttccttgtgtatggataatccgggaacaggccaactaaatatttgatgaatgtatgatttcaaatacagtgaattccctgggagtcatcaaagaagaccggcattttatggttgtttttattaagtgtatattctttgctcctgaaaatgttattaaataattgtttaggccgggcatggtggctcatgcctgtaatcccagcactttcaaaggctgaggcaggcagatcacctgaggtcaggagttcaaaaccagcctggccaacatgctgaaacctcgtctctactaaaaatacaaaaattagctgggcgtggtggtggatacctgtaatcccagctacgtgggaggctgaggtgggagaattgcttcaacctgggaggcagaggttgcagtgagccgagatcatgccactgcactccagcctgggcaacagagcaagactgtctcaaaaataaataaataaataaaattgtttaaat

SEQ ID NO: 16543 - DNA, 464 bp, Homo sapiens
catgtacttatcaatgttgttcggtcagcccttccctaattacacctatcccctacacatacatgcacatagacacacacatgaacacactgaagatatttccttcaggtgtgtgtaaaatatgctgcttggattgaaattcaaatgggattgattagtcaagtaacttgagacctcacagtaatcttcacacttaaccttagacacctatgcagtcatgttgggagcaggttacaatgttacttcagcccacagtttatttctatacttgagttcttaagtacagaagatagaagtgatttaaatggcatagtatatatatcattttctggccttttaaaatttatttgagacctcttgatgaaatggacatattatatatttctgccacctggattttcctggataatttgatggaatattttaagtttcagtaaatcagaacaataaacaaactcagatat

SEQ ID NO: 16544 - DNA, 477 bp, Homo sapiens
taaatgtcagctggttttgatactgaatgtgaacaaggctcacctaaggaaactgacccagaaaacagttttagctgacaaagaagaaatttcagagtgaaggaattttaaaaatctggctgacggaatatcattctggttgccatctttttctgtggaactcctctgcatttcttcctaagtaattacttcaaaaattaaattcaacttcttataaaggaagaacaagatagtccttgaaaatactttttgtatataatctctttgccctctatcctgagtaactaatggacatcttctcatgcaaggtttatatgaagcctttttaaataaatgagtcaaagcacttgtattttccagcctaggctttgtgtgaattataggctatttgaaattttatttctgattatgtcaaatacaccttccattttgtcatttttgtttaaactgataaattacaagtcaacattgagtttt

SEQ ID NO: 16545 - DNA, 1653 bp, Homo sapiens
cctctattggtacaacatataaatgaaagtacacctacactaatagtctgtctcaacaatgagtaaaggaacttaagtattggtttaatattaaccttgtatctcattttgaaggaatttaatattttaagcaaggatgttcaaaatcttacatataataagtaaaaagtaagactgaatgtctacgttcgaaacaaagtaatatgaaaatatttaaacagcattacaaaatcctagtttatactagactaccatttaaaaatcatgtttttatataaatgcccaaatttgagatgcattattcctattactaatgatgtaagtacgaggataaatccaagaaactttcaactctttgcctttcctggcctttactggatcccaaaagcatttaaggtacatgttccaaaaactttgaaaagctaaatgtttcccatgatcgctcattcttcttttatgattcatacgttattccttataaagtaagaactttgttttcctcctatcaaggcagctattttattaaatttttcacttagtctgagaaatagcagatagtctcatatttaggaaaactttccaaataaaataaatgttattctctgataaagagctaatacagaaatgttcaagttattttactttctggtaatgtcttcagtaaaatattttctttatctaaatattaacattctaagtctaccaaaaaaagttttaaactcaagcaggccaaaaccaatatgcttataagaaataatgaaaagttcatccatttctgataaagttctctatggcaaagtctttcaaatacgagataactgcaaaatattttccttttatactacagaaatgagaatctcatcaataaattagttcaagcataagatgaaaacagaatattctgtggtgccagtgcacactaccttcccacccatacacatccatgttcactgtaacaaactgaatattcacaataaagcttctgagtaacactttctgattactcatgataaactgacatggctaactgcaagaattaaatcttctatctgagagtaataatttatgatgactcagtggtgccagagtaaagtttctaaaataacattcctctcacttgtaccccactaaaagtattagactacacattacattgaagttaaacacaaaattatcagtgttttagaaacatgagtccggactgtgtaagtaaaagtacaaacattatttccaccataaagtatgtattgaaatcaagttgtctctgtgtacagaatacatacttattcccatttttaagcatttgcttctgttttccctacctagaatgtcagatgtttttcagttatctccccatttgtcaaagttgacctcaagataacatttttcattaaagcatctgagatctaagaacacaattattattctaacaatgattattagctcattcacttattttgataactaatgatcacagctattatactactttctcgttattttgtgtgcatgcctcatttccctgacttaaacctcactgagagcgcaaaatgcagctttatactttttactttcaattgcctagcacaatagtgagtacatttgaattgaatatataataaatattgcaaaataaaatccatctaaatagaa

SEQ ID NO: 16546 - DNA, 896 bp, Homo sapiens
caagaaactatataggtatacacttacgacttcacaaaacctatacttaatatagtaaatctaagtaaacatgtattactcaaagtaatatatttagaattatgtattagtataagatcagaattgaatttaagttgttggtgacatctgcatcatttcataggattagaacttactcaaaataatgtaaatctttaaaaatataaattagaatgacaagtgggaatcataaattaaacgttaatggtttcttatgctctttttaaatatagaaatatcatgttaaagaaagtgagtgtatcatttctattaacagtaatttttctaaaaatgaggaaggaagtagcattagcagtaaagacccacaggccatgacctttttgatcactctgaggacaatatttaaatgacaggaaggtatattaatgtaacaagcattcatttaaggaatagaccattttctctgacctcttcttcaggaaagctttcacactggtatttgtgatctcaccattatgacatccatccccctagctcaccacatagcacatagaatgatatttttgatttgtaagaggccatccaggtactaaggacccaaggcatacagattcacaaaattaactaatctttttgcctcagaataccaaaacaacaaaattataaagctgtatttggacaactaaaaaacaccaaactatctcattgcaatttgtattttagcagatttcagcaactatcctaaacaatgttattgtgttccattttaactgggataaatgtttttgtaaaaatacaaccatagaaaggcctctttgttacaaaatgatttgcaaagaaataactgctttgtttgcaagattaaattagtgttggcaaaataaagttctaaagat

SEQ ID NO: 16547 - DNA, 1079 bp, Homo sapiens
taattagtaattggtaatgtccatttaatataagattcaaaaatccctacatttggaatacttgaactctattaataatggtagtattatatatacaagcaaatatctattctcaagtggtaagtccactgacttattttatgacaagaaatttcaacggaattttgccaaactattgatacataagggttgagagaaacaagcatctattgcagtttctttttgcgtacaaatgatcttacataaatctcatgcttgaccattcctttcttcataacaaaaaagtaagatattcggtatttaacactttgttatcaagcatattttaaaaagaactgtactgtaaatggaatgcttgacttagcaaaatttgtgctctttcatttgctgttagaaaaacagaattaacaaagacagtaatgtgaagagtgcattacactattcttattctttagtaacttgggtagtactgtaatatttttaatcatcttaaagtatgatttgatataatcttattgaaattaccttatcatgtcttagagcccgtctttatgtttaaaactaatttcttaaaataaagccttcagtaaatgttcattaccaacttgataaatgctactcataagagctggtttggggctatagcatatgcttttttttttttaattattacctgatttaaaaatctctgtaaaaacgtgtagtgtttcataaaatctgtaactcgcattttaatgatccgctattataagcttttaatagcatgaaaattgttaggctatataacattgccacttcaactctaaggaatatttttgagatatccctttggaagaccttgcttggaagagcctggacactaacaattctacaccaaattgtctcttcaaatacgtatggactggataactctgagaaacacatctagtataactgaataagcagagcatcaaattaaacagacagaaaccgaaagctctatataaatgctcagagttctttatgtatttcttattggcattcaacatatgtaaaatcagaaaacagggaaattttcattaaaaatattggtttgaaat

SEQ ID NO: 16548 - DNA, 998 bp, Homo sapiens
ttccaagttttcctttgctgtttataaactttactcatgtatttgtagtagctgcatttgtcattaataagagagacataatcctcctgttatactcagtatcattatatgctagtcaacctgattcactaacacacagatgaacaaccaaaatatacctaaaaggtatagtctctaggagttttattaatagtaaaggtaaaatctctcagtttcctacctctagaaagaggccatctcactagaataggatattatgcatactgagctagaccagaagagtctggaacaaaataaacacagcctttataatcaacttgaatactggtgttagctgagaactctgtaagtccctttaaaaattatgtatcttttggttcaagattaagaagcataatgacaacaaaaaaagcaggcagaatttatgaataagtgttgtttattattaaaacaataatttgttaatttcttataaggtcctgtgctataattactggtataaatataactgaatattggggtagctttcatttcttccattaattacatgtgtaaaattaaaacactactgtaatgttaatttcctggttttgaaaatcatattatggttatgtacattgttaacattaaggaaagctggcagaagggtgtgcataaattctatactctttttgaaacttttctataattctaaaattattttttaaagttaaacagtatattaagattaccttcactattcctcactcaagattaagacattttttgaaaagcagtagagtttgcttaaaatacaaattaattattcttgactataaccttgtaaaggtaaatctaatgtataaatttttgaaaaattttgcaccactggtcatagcatctatctcctttgccttaatttactgaaatacatcattttattcggttcaattgaaataaagctatgtctttactatgtattggccctaccaaaatcatatattaaaattttctaacat

SEQ ID NO: 16549 - DNA, 2648 bp, Homo sapiens
ctctttccctgcagtgtctttgaaacttgaacataatgtgaaggctgaatgatagagatattttctgttgtgttgggtgacctttggttgtgaatgtttttgcttttaaccccttttgaggtgggattgcctcttggagacatggaattgaagagcactagaaacaacttcctggacaaggaatgtaggaagtgagtgctgtgtcccaggaagctgctcacactcttaaaatggaagtgtccgttaagccctgggaagacgttctggatagttcttctttcccaaccagggctcatgtctgattctctaatgcgaaaagccttattctaagacccaaggtttggatctgctaccaccagactcctaacatagaaaacttgaattgtcacatacattttacagtttggacttttaagaaaacatggatactactggaacttcccccagctgagttacatggtcactttttcagtgcaagccacatatcaacacaggtttttaggtggttccctgctgcacagcgtgacctcgtggtcgcgcagatgccgattctgagcagtgtagactcagggtccctgtggaggtgctgaagcccacagttccacacagggcagcagggagcgcaaggctcaggtcaggatggacaccactcatgcgagcattgacctttttttttttgctttacaatttaatctttcacatgagggggagatgagctgttctttcccactaaaaattgctgctgtagaagttggaggtggagctgtgactggctgagctgctgtggccgggctgggcagtgtgccccaacagctcagtgctttcctgacactccagtgtctggggtggttgaggagcgagttctctcttcctcccagaccaagttcctccctcgggtttgccttgagacgtgttgcgtttttgggccccgtggcctctccctgttaggctgccacaggccctgcttctggaaggtgaacagctcctggctgctgccgagagggttctcgttggggtcaccaaagtgtgcccggctgctatgaaaaacgttgggaatcttggtttcagttttttattctatgctaggttgtacagacttatttatatcatcgttttgagggactaatggaggcttattgtaacatataatattagtgaaaccatggaattatatgaaaatgatacatgagaaataaggaaactattttgctgattgtaaatttttgtgggaaattttgtgataacttgagaattatacttgtttgaatcaaggcaactcttctagaatttattgttcaattctgtcatatttacttctaattctactctcagaggtgcaaaaagatacttatctaactggacacttttactgttttcttctcacttccaatgacaccgtctcatacacacgggtcctgtgtgctgggatgggggctttggtgaagtgcacggagctcacggacaagccgcaggctctgggaagcgtggaggtagtggccgttgagtactgtcttgacccaagggagttcactgttgctgggctggggctggggcagcctggtttgggatgattttgcccattgtcacggtgtgtggaggatgctgggtcctgggttcaagtgcacatgtgagggaaccccagtccgtgggaaggtgggctgggctccctaggtccttcagggctgcaagagttattgcctagcacagggcccagacagggctggactagacacgatgaaaacagcctgtatttgagggagaagagaaaacagatggagacccccactctgtctggtcttggctcccaccagcccgggctgtgaggagcccctgagccgcgggtgccactgctgtggatgcgtttctggcccgtcttggaaactgctgctgctgcgtagtcatgacggccctgactggtttgagacaacacgcgttcacagatcttaacaatgctaaatgggcgactgatgaggtcacggttcttaaggcacatccgggacgatcgatatagcacttaggctatgcaggggggtctttctttcataaaggacctcattccttgcgtcccagcccaggaacagtgctgtctttgctgtcttaggccattcttgttattaagctgacagcttcactttcttgtggaagaccaagaacagcatgaggacttgctgagactgcctcacggtgccaccatgcggaccggggggaggcagggagtgagggtgtggctcccctgggctactaaggacagtttaaagatgaggcgccataggcatccgtctccagagcccccaggaggcaggaaccaggataagggtggcttctcccagctgagtaatgtggccaccatgtccaaggtggactcggtgtgaggctgcagtgggtgggggatggatcctccccacacatctgaggacacacaaccacttggtacattttctcagatgttaagcttatttttataaaccacattgtacgtgtcacttttatttggcattttatacttaactagttgtatttatttttcatgtcatgagagtttccatataatgtgccataactgcatagacagcacgtcttcagggtgtggtttctaagcagaaaatagcaaatgtttatattgaataaaattgcatgttcctccacgc

SEQ ID NO: 16550 - DNA, 3790 bp, Homo sapiens
gggctgtggggcgccgcacgctgcagctaacatctgcttcacctcaactaacccagcagcagcgggacggcggtgctaggtcaatcttaacgtgactaatgcacagagggtaggagtctagccgaggcgccatggggcgttgcatcagcaggacacttgtgagagctttgtgtcgcttctcactcctcaaagccccctcaggagcacccagtcctcagctgctctcttaggtgggggtcagaggtggggatagagctgcacattcttgcagcagatgtgtgatgaaagcatcttctaagccctgcgcacccgtggggaaacccaagggaggagtcctggtcctgctccctcagcacccaaaaggggcagaacctgagttgagacttgcatgttcctcgcatgtgtctaatgtcagcactagaaagcagttttaggaggttccagcctgcagcataggtacgacctcagaggatggctttgcacttggcatagtttcatggaaaggagtacgttgtagtttatgcagtatctgactgcaaatcatattcaggaaagaagtgcagaatttcttccccaagcccagagaagagcagccctgagcccctgtattctgctggccagacacacatggcacagacacagctgaccataacccaggaatccagagctcggtttctcatttctgagatcaggatgcttgtatagtggcctgtgaggtgacagattggcagggcccaaggccccaggttttcatttttcatgagaaaagctttccaagtgcctggccagaccttggtccttagtgcagagcccgtccttttgtacttggggtgaccccagcagccaattatccggccttccatagggggttcagtcccaaagacatggggctttgaaaaccctagcctgaagtctgagccaccaagggcttggctgggttggacacccacaggtgtatccagagcccagcccggtgctgggaaagctttgcatagggccagggccacttgtcaggattcacaggtaggagatgtttaggtctctttatttagtgcaatctgggggatggcaacagagaaagaggaaaggtagctgtagggttctcccatttccagaggctccatccacacctgccttcccacattctgagcagaacttttctcagtacttttttcccgatcaccctgtgggaccagctggacctgaggctgcagtcttctctcctgcaggctgcttgccttgtctctcatgcggaagaggcattcgagttacctggtgagagaccgtgttgccccctcccacagctctctgccctgcgcgttcttccctttggtgccgagtatgtttcggtcccctccagactccaggacacgcccatgtatgtcccctgcgtgttcatcctgggcccagatccccctgccccagcaagactcgcagtgggatggctgctggcatgcccaccctgcatgcgctttgccctctccttgcaagcctggcacatagcttctctccatactcctaagggactttgcagacacccaagccactgggacccctgctaacacatgcaggtcttctcttctgccaactaacgtgctcgcgccctcccagcacgtggagagcttcaattgtcagataaacaggaagcgacagatgaccgctttctaacgctctcttttctcccgttttcagctgtagagtagctgccaggaggacttggccacccggccctgtcacactgcagccccttccccttccctctcgtggcccacaaggaggaaggaagggcaacctaaaagcccacttagaaactttttggatatgccactgcaattcttttcaaaatagcattccccaggtttttaatgggaggaaaaaaagctttaatgttgagcatgctgcgagctgctgcgtggaaaggcctctgtatgggccgaagacccttcttccctggctgccaggctcgccaggagcccactggaaacgcccaccacgggggctccttgttacacatgttctttttttatccgatcaacctgtgcacttttgatattttgatattatatttgcttccttaattcctcgcgtagagacggtctcaggtgccgtggtctatgctcgtggtcctgtagctgtccgcctcagctcccaccgtgtttgtctggtgtcagcacgaggcagagctgtgtgctccatagcgtgtagctttagactcggagatgagtgctttgacccagcgaggagctcagctaagtgtatccacgctgtggttcagcagcctttagatcatacggcattgtggttcatgtttgaaattacagattttaaatgccatgttcattaagaaatccagggtattcagattctggggtttttcatattgtattattattattcttaggaatagttcaatgtaacaagaagaaaacttgacctttgctctggttaaaacagtaataggcacttgaaaaaaaaagataaattattgaatgagtagtattacctacaaattccagaattttctgggttttaggacgttgtgaagcatgactgattaacagaattttatacaactgtaccaataaaattccaaattggaattgttttgttactctggttgttgtgccaaattgtggtacacttagaaaattctacagtcgtcgatttttagggtgttctctttcaacacctttttgttagtaatcattgccagtagtgccttcatcagttaagggaggtgtcccagcacagatcattctcaaaagcgagcagggaagagctagtgggcatgctgaaggccagcgtggacagcaggtgaggcaggtgctcctcacacccagacctgggcatcttcattgagggaaagaaaacagtcattgtgcaaaattctgttagtcagtgattctttacttgcaaattcaggggcttagaaaatgaaagcaaacacaaaaccttgagtgtgctttgggaaccaaatggaccttctgggacaagctgagcaagctgtatgaacgccacgtttgtgaagagctgagggtatcaggagggccgacgctgtgttggcatgcgcagtaggggatgagggttagccatagtattctttgcaaatgtgaaagcgagacattatatcttctcttgcttggtgtaactaatcactgttaatttcaggaaacagaactcattaaaactccttagcaaaccaggtctacatcctgttttgtttgctgagtgaggttagtgggagtggtcaaattggtactcttggaggaagaaaaactgtccttccttctccaaaaaaggaaaaattataataatataaatgacaaaaataaaagaattctgtttcctggaataagcatttcttattcctagttgtagggactcctatttttaccttccgttacagtgttgattcataagaaatattgttacatttgagataacttcatctgtatggggtatttatttgcaatgatgtctgagtactgtattttttctgtgcattaccttagtgtcagaatgttggtctttattttaaagtcatatgcatgttctcctgccaaggaacctttacacagacccaaacaaaaaaataataatcaaatgccttcaatttctgagaaaatgaggcagagcatggaaaaggaataggaaggagaaattaattgagattttcaggacacagacatatgatgtgaatgcctacaaagccagtgcgcataggaacagtgggcctgggtaaagagtcacattggtaggaccaataaagaataataaaaagacaaagcac

SEQ ID NO: 16551 - DNA, 158 bp, Homo sapiens
ttagaattatgaacatctggatcatatagctgatgtgtagttacacatatggggagacacttttgagagtgtttaagcaatgtatagtggccatctttggttacttgatattggtgttgtcaagctcctgcaaataatagtaaatgtgcaaggagatg

SEQ ID NO: 16552 - DNA, 742 bp, Homo sapiens
gaccctggatgttgcctgccctgcaactcagctgcccgaccccaggagtcgccatacctgtgaggtgtccacctccctgcacatggcactacccagactgccagagcccaggctggcctcatctgcaccatgtccccggaccagcccttgctctgactgcggccaagcaccacgcaggaggccactcttgtctctcagcagctgttcccaggaggcagctccctcctggcacatgggggctggccacaatagcccagagggtcagaactggacagctgcagagacctgtgcccagagaagggtctcgacccactcaaggacacacagcaggtccgtggatgggctggatgagtgaccagggccagcctctgtctcaggacattccagaaggacaaggagatgtctctccctctcccaaagcaccagcgtccctgcctcccgtgggccctgtccgggttgccctggtgaccccagcctctgtccacttcctaacccagggaccctgcacagccagaactgcctttggccctacggatggccactggctctggtcttaagtgcctgggcttggtggccatcaagagggagccagtcaggcctgtgagggccgtagaccttgtatataccctgcaccagcagtgaccgggcagagcccaaccccctccacgggggtcccagcacccacttttctaatcatgaatgaacaataaagcccacgctctttgtcaggctccacatgcca

SEQ ID NO: 16553 - DNA, 1111 bp, Homo sapiens
aaaactagggtcaagttctgcagaggcattgaaaggacaagaaaccaccctgatacccatcgtgtgagggaaaatgctctattcaccattcctcagcttctgcttctggtttcagagttctctctatattggagggtgttttaaagctagagtggtctttatccacttttattaacacatctgaatgtgaaggtcaagagaggaaagtgatatgtcctaagtcagagtagagtcaacaagaaaataagacaaacagcgactgagcccctggtgtatactgggcattggccagctactggggatatggagatgaagaaaacataacccttcttcaaggagcccaacctaccaaggtagacagacatatagacaaatagatacttgcatagaaaaaaagaggaaaaggggatcagtgtgacctgtgtaactaagtaccctataaaccctcctgcaacagatcatattgccctttatagtggggatggtaatcccatctgaattccacaggtactttgcagtcataccacacccatgtgtctgtcggtcctgactgtaccatttataaacagcttcactttcagcagttctcagccctcttaagctagggtcattgtcagtagggatactgcttcataagcaccagcagaacaccaaaggagaccatatgggtgaaagcaaccagcactgccctggcgcttcataggttcttagagtttttatcttttactttcagtctaacacagcactgcctgctttttgtttttgttgcttggtttgtttttttcttaccgtgttcaccaaacttgtgtccaaatagctttgggctgatgcaaaaatatctatgtggaagagaagagttgttctcatggagggccttcagatgagtgctatagactctctaggcaactccaagaggcttctcaagcagggtgggcagtgagagctgctatggaatcaatggacaaactgacagggactgctttgaaagacagtactcagttgagtatatatattctctcttaagggctaaaagtttataatcatcccttaaacactctgtgatgggatcttcaggatcatcttttgaagtaaactatattttacaatgtga

SEQ ID NO: 16554 - DNA, 537 bp, Homo sapiens
gggcggtatacggtgcggggcctgggatgcccgcgccacccgcagccccctcactcggcggaaacccgcgagccggcccttccgcgtccaagaagtttacttcctaagcctttttattatgatcttgaatgcggacaattggggccaaacgaggaaggacacagacccaaaagccagacccaggtcccagcgcgcttctgggctctaacctgggagactcgcatccagcccggcggaagctacagtctctaccctgagctccgtggcgcagagcgctccacgcgtattcacgccccgctcctcgcctgcacccccaccccgtctggggcctgccctcccggccggggagcctccaggcacacacccgcttctggacgtcggggacccagcggttgggctcaggccacaacggcctgagattgccccggggcaacccgtcggctcggcctggaggccgggtccccgatgtcgctggggcccctaccccctcttgcgaagacggtgactttttttccaataaaatattttatgacacaa

SEQ ID NO: 16555 - DNA, 216 bp, Homo sapiens
cgagtttgaccccacatgccctcttctgtttgtcttgcaccttgtctaaggaccctaaatgaacgataaacagagatggtagctatgagtatacaaaaggtaaatccacttaatcacatacagaagagcaacaacaaactgcttacgacaggtttggaagccacaggcgattctatggtcaatgtgaaggactagaaataaaaacccacatgtgga

SEQ ID NO: 16556 - DNA, 241 bp, Homo sapiens
gcacctgccctgcctgcatccggagaattgcctctacctggaccttttgtctcacacagcagtaccctgacctgctgtgcaccttacattcctagagagcagaaataaaaagcatgactatttccaccatcaaatgctgtagaatgcttggcactccctaaccaaatgctgtctccataatgccactggtgttaagatatattttgagtggatggaggagaaataaacttattcctcctta

SEQ ID NO: 16557 - DNA, 2651 bp, Homo sapiens
aaggcacgcaggccgtgtgggtgcccggcgtgagggatcaggctcgccagggccacaggacaggtgatgacctgtggccacgcatttgtggagtaagtgccctcgctgggctgtgagaatgagctgtacacatcttgggacaatctgctagtatctattttacaaaatgcagagccaggtccctcagcccagactcagtcagacatgttcactaatgactcaagtgagccttcggtactcctggtgcccgcccggccagaccgtcagcttgataattactaaagcaaaggcctgggtgggagaacaggtttctagtttttacccaagtcaagctgcacatctattatttaaaaattcaaagtcttagaaccaagaatttggtcatgaaccattaaagaatttagagagaacttagctctttttagactctttttaggagtcagggatctgggataaagccacactgtcttgctgtatggagaaattcttcaaggggagtcagggtccctcaggcttcccttgtgtctccctggacctgcctgacaggccacaggagcagacagcacacccaagcccgggcctccggcacactctttccactctgtatttgctaaatgatgctaactgctaccaaaaggcccttgggacatcagaggagccggcaggcgaaggtagaggatgtgttccagaaacattagaaggcaggattaattcagttagttagttctcttgttaaatggaaatgggaattggaaattcctgataaagaattggcctggctgggtgcagtggctcacacctgtgatcccagcactttgggaggccaaggcagggggattacttcagcccaggagttccagactgcctggctaacatggcaataccctatctctactaaaaatacaaaaattatcggggtgcaatggcatgcatctgtaatcccagctattcaagaggctgaggcatgaggatctcttgaacccgggaggtgggagttgtagtgagccgagatcatgacactgcactccagcctgggcaacagagcgagaccatctcttaaaaaaaggcattgttagtgtaatctcaaggttaacatttatttcatgtcagtacagggtgctttttcctttcagggacattctggaattgtattggttgtacattcttttgtgtctattctgtttgtcaagtgagtcaagacttgcttttgtccattttgatttgtgtgtattagtctgagtcttggctccgttttgaggtatgagcaaagttttgctggattagaagttaacctttagggaaattccttattttggtatgtggcaatgctaatagatccactgaagatctggaaaattccaggaacttttcacctgagcctttcttctgagaaatgctgcagtcagaagggtgtgctggtaaagtattttggtggcagctgccatcatggtcattgccttcatataacatgcttcgtgctcatggtcattgccttcatataacatgcttcgtgccatcatgatccttgccttcatataacaaacatgcttcgtcagaggtgttggggttgaaaaaggagctgcatgcttcactggagttgagggcctctctcctgttctgactttaagccagaacttgtggctgggccatggaagctgtgactcctctgtggacatggtggcagcagggaacccctagagagaggggccactgggaccaggcctcctgttgtggagggactcctgggacagtcctccaccctgtcctgtggtcctgtgtacagggttggcctcttcctcctcccctgccaggcctctgcccatgccccttccttccttctcctgggactggtgaagctaggcatctggaagacttcttcctagcctggaagccctgacctcggcccatctgcagaatctcccagttccttcacagctgccgagtcctctcacgggtgcggtggaggcggccttgccggtggtgctttctgggcagccaggggttcctgggtgggaggactgtccctctggggacgtggcactgaagtgcctgctggcttcatgtggccctttgccctttcccagcctgagagatgctcaaaggtggggagctgggggagccacccctcggccattccctccacctccaagacaggtggcggccgggcaggcactcttaagcccacctccccctcttgttgccttcgatttcggcaaagcctgggcaggtgccaccgggaaggaatggcatccgagatgctgggcggggacgcggcgtggccgagggggccttgacggcgttggcggggcctgggcacaggggcagccgcagggaggcagggatggcaaggcgtgaagccaccctggaaggaactggaccaaggtcttcagaggtgcgacagggtctggaatctgaccttactctagcaggagtttttgtagactctccctgatagtttagtttttgataaagcatgctggtaaaaccactaccctcagagagagccaaaaatacagaagaggcggagagcgcccctccaaccaggctgttattcccctggactccgtgacatctgtggaattttttagctctttaaaatctgtaatttgttgtctattttttcattctaaataaaacttcagtttgcacct

SEQ ID NO: 16558 - DNA, 3410 bp, Homo sapiens
ggtgattaaaatctgaagcaaagaggccaaagattggaaaccccccacccccacctctttccagaactgcttgaagagaactggttggagttatggaaaagatgccctgtgccaggacagcagttcattgttactgtaaccgattgtattattttgttaaatatttctataaatatttaagagatgtacacatgtgtaatataggaaggaaggatgtaaagtggtatgatctggggcttctccactcctgccccagagtgtggaggccacagtggggcctctccgtatttgtgcattgggctccgtgccacaaccaagcttcattagtcttaaatttcagcatatgttgctgctgcttaaatattgtataatttacttgtataattctatgcaaatattgcttatgtaataggattattttgtaaaggtttctgtttaaaatattttaaatttgcatatcacaaccctgtggtagtatgaaatgttactgttaactttcaaacacgctatgcgtgataatttttttgtttaatgagcagatatgaagaaagcacgttaatcctggtggcttctctaggtgtcgttgtgtgcggtcctcttgtttggctgtgcgtgtgaacacgtgtgtgagttcaccatgtactgtactgtgattttttttttgtcttgttttgtttctctacactgtctgtaacctgtagtaggctctgacctagtcaggctggaagcgtcaggatatcttttcttcgtgctggtgagggctggccctaaacatccacctaatcctttcaaatcagcccggcaaaagctagactctcctcgtgtctacggcatctcttatgatcattggctgccatccaggaccccaatttgtgcttcagggggataatctccttctctcggatcattgtgatggatgctggaacctcagggtatggagctcacatcagttcatcatggtgggtgttagagaattcggtgacatgcctagtgctgagccttggctgggccatgagagtctgtatactctaaaaagcatgcagcatggtgcccctcttctgaccaacacacacacgacccctcccccaacacccccaaattcaagagtggatgtggccctgtcacaggtagaaaaacctatttagttaattctttcttggcccacagtctcccagaaatgatgttttgagtccctatagtttaaactccctctcttaaatggagcagctggttgaggctttctagatctgtttgcatcttctttaaaactaagtggtgagcatgcattgtggtgtagaggcaggcattatgtaggataagagctccggggggattcttcatgcaccagtgtttagggtacgtgcttcctaagtaaatccaaacattgtctccatcctccccgtcattagtgctctttcaatgtgatgtgggaaagcaggaggatggacacaccccactgaaagatgtaggcaggggcaggtctctcaaccaggcatatttttaaaagttgcttctgtactggttctcttcttttgctctgaggtgtgggctccctcatctcgtaaccagagaccagcacatgtcagggaagcacccagtgtcggctccccatccaaatccacaccagcaccttgttacagacaagaagtcagaggaaagggcggggtccctgcagggctgaagcctaagctactgtgaggcgctcacgagtggcagctcctgttactcccttttaaattacctgggaaatcttaacagaaaggtaatgggcccccagaaatacccacagcatagtgacctcagaccctgatactcaccacaaaacttttaagatgctgattgggagccgcttgtggctgctgggtgtgtgtgtgtgtgtgtgcgtgcgtgcgtgtgtgtgtgtctctgctggggaccctggccacccccctgctgctgtcttggtgcctgtcacccacatggtctgccatcctaacacccagctctgctcagaaaacgtcctgcgtggaggagggatgatgcagaattctgaagtcgacttccctctggctcctggcgtgccctcgctcccttcctgagcccagctcgtgttgcgccggaggctgcgcggcccctgatttctgcatggtgtagaactttctccaatagtcacattggcaaagggagaactggggtgggcggggggtggggctggcagggaattagaatttctctctctcttttaatagttttattttgtctgtcctgtttgttcatttggatgttttaatttttaaaaaaaaaaaaactttgctgatatttataattttgtatcataagaatgttttcctctacagtatttgtcatgccagtttataacaaaaaaaaatgcagggattttatttctattggaaacattacagctatgttttacttttggacagaatttttatttgtatagagtgcttactaatgttaaatagttcagagtatataacatttacattaaggactcatggtaggttttagggtaaggagtttaaaggaaataaatattcaaactgggtctcattgccaattttggtggaaatgagtttgtgtcatttcaattacaaagataaaagtatgccatataatttatttatatgaagatttatttttgtagtgtacatagtagtcatcaagtcttttgacagaagtatatttttaaagaatttatatgtgatgaatccataatgtctggaactttgctgagacatgagtgggcacagttttcattgtaaattacagcaaggaaagaaaatgtttaacagtgttaagagagtcagagcagagtggatattcatgcgattatgaagtgtttattagttaccattggcgacctagcatgcttctcatttcaaaccttggaaggtgaaaatgtacaaactctctaaataattaatgttcaaacactgatagaaattctaacatgaataaaaaataatataacttgttggttatatctttgtttgtagaatgctttttttctttaaaatacttgggagagacagttagtgttggagccatcagaaactgttgtttcatcttgctgaccttgtgacactcttcttttttgctctatctgatggagagagttttaggttttcctcctttttgttttgtataaatagtgggtataagcatagctctgttacatggatgtattacaaagtgggggctgagcttttagtgtgatcatcacccaaatagtgtacattgtacccattaattaatttcttatcacctgaccctatttttgttttctcataccaagaaacttcctaagttaaccatcaaaattagtccttctgtcatctctcttagcatacttatttcccttatgtgatgcctaataatgagggaacataaataaagccaaattcaaagat

SEQ ID NO: 16559 - DNA, 153 bp, Homo sapiens
ccaggcggtgaggagtccagcacaaccttttcctcaccagtcccatgctggctgaagaggaccagaggagcagaccagcacttcaacctagtccgctgaagatggagggggctggggtcacagaggcatagaatacacattttttgccacttt

SEQ ID NO: 16560 - DNA, 535 bp, Homo sapiens
agagtctgcagcaggattggagactgacttgtgactgcgggctgggggggcattcccagtaggaatgtgaagccagaggtttcggattcgtgacatccaccccctgggcaagtgagagcatctgcaaaatgcaaagagaactacctcatatgcaggatgagccaatggcagtctcaagaaatgtactcgggcgacaccttacctgtggaaagcaaatcttttcaaaataagccactgggactcggtaggtggagccccagctgctcttctagggacctatggggccttcgtggcatctctgtgctgtgtgctggggaggaggttgatgtaatggtgactcttttctgatcagcaccttggccgtgattcccaaggtcccagccaaagcaaagggccagttgtttcagtttaaacagacatgtctttagtctaataaaattagttaactgccagtaaagttatttgttagctttgatgaaagctatgttggtatctttccctaatcatcaaagtaaataaaaaatcatttctatgt

SEQ ID NO: 16561 - DNA, 283 bp, Homo sapiens
cttggacactgactcttccactgtacaaaagtactgcccagcatacttaaaaagtagatccttgggcataagctaagcaccttatttgcttatcataggctgctattctgtagaaatttatgaagaatgttattgccccagaatatggggtgagagagaactgcacttttttaatatggaaatgaattcatcgtaaagtttaaaatattttgtaaatatggactgcacagtacagggtagaaaactacatattgtgggaagctagattttgcaagtttaatgc

SEQ ID NO: 16562 - DNA, 3638 bp, Homo sapiens
gtaaaaacctgtgaccagagctgaaggaagactctaggactgaaaactgcaacagaaattagcacaatttgaaaacaaaacaaaattgcaaaagccttagttgctttttccacctaagaagttgatcaatggagaaaatgtccactggagtttgaataatgaactttgagtttgggtgcaagcaaatgactcagagaagggtccagctctcaagctgaatgacaaacatgctgttgtaaatttagtctcaggtgtaaatacccaagccctctggtacccagggagctggctggtctgtggtgcatgtgtgtccctgtgatggcaatcattgtagttgctggccttcagaagaattgaggatctgatggaggttttttatgtatttattttctgttcaccttgtgaccctgtgtcaaaatttataaagatacaaaaggcattactgaaatggtactttctgtaatttgatactatttggcttaatcatcttcacttgactatttgtaatactgttgtaatgttaactctgttaagtacccaagctgcttgtcttccaccaaagagtgctttattaacaagaatctgtgaaaatcacatttaaacactgttgcatgttgtaagaccaggtggtaccttagtaacctaaaacttgcaagagaatattaatggtagctttagaagactcaggaggagaaactgacttcagagttggaagatgttgcaagtcgttcctttttctgtccttcagggactgaagaactgggaggctgcccattgtttggttgccagtcatacaaattaaaatcatatttccttccatgaatggaagaaacacactattggtttttccccttggaaacagcaatcccaaataatgtcggcttacaaaaaaaaaaagttaccacttttttagagtccttccctgtaacattggattttttttttcccttatgagatccacctaaggccattgacgtggcctgcgatctcagtgacaatgatctgcttctggatctcactgttgcctttggttagggaacacaactagtaactctgcagagtgccttctcccgcagccctactggaacacagcagagtctgtgccatgaagcagttacagaaacagaattgatgtgctgctaaaaaaaaaaaaaaaaatggggcccgaaataaaagaatatatagtactcacctcagttccttccataagaagtgggtggtttaatgattgttaagccatttttgcctgtgccgggagcatggagggctgagatgtcgacaggcagtgggaaacaaatgccctcctaagccacaaggcgtgcgccagattagtaggcaactccattttaagaagctgcctttttcacaaaactggaagaaataaaagcggttggaataaacaagttaaaagtctttaatgcaaaaagtaattgaaaggcagtgcctccattttggtgtactttcttggaagaaagtataaaattgaccggcatcatgagagacggaagatgccgtgttctcagccaaacaagcaactctttccccgccaggcactgtcgggtggggtcaggccagcttttaaacactggggactggatcacagaaaaacagtggttttctgtccctggaaatgaataggcacaaagacccacttggctgtgggcagactactcttcaataagatttgggtgggaggaggaacattccttttgctattttgagctgagacaatataaatattcaaactgtgccatgcataaagcattgaattctcagggcacctcttcttccccttaccccttttaaggccatcccctccattaataataatccaggtagttgtgaaaatcgtgcttctatctgatcccttcttagtttggcttttcatcccatcagaacaagtaaacgtaggcgccacagctcttgtgagtactgtctccctcacggtgaatgagcctcctggtgtttcgtccaagaaaagaaagggtgtcactggaaccacagccctttttcattttataaactgcctcttcatgttgcctgctcaagtttccacctagaattgctatcactgtggctctttctaaaaatctttctatttaactggttcactgaaattagtcatagaaaacttgtgatttggtgaagaggcattccttgtaataaccaaatgacttgggatggtgtgcatagcaagggcagtgttacacttatgaggactgtctctagcatccaggaagtctctgggtctgagggatggaaagttcttcctgctatgaatgagagtggactcttcccctcacccccaactgaaaccacaaacaaccagaatcttctggaattctgacttagagtcgttgttatagaagaccttgttgctatggaacatgaaactgtgtgtcagatggagagatccccttaacctaagagccttaaatagccctgaaagtacactgggacggtttgcgatggaattaaaattggaagtgaatatttttaggtgctcttgaagctttctggggactcaaaattatcaaaagtcagggacagtccggaggaagagcgtctgcaaaactgggttcctagaagtatagacggacttagctttttgtagaatttggtgaggagcagcgcctcgtgagagcagaatggcctggcgtggccagtgcttcccggcagcacgcagctctgcggcctccagaattcccctgttctgagcttgatgcccctagcctgtcccctacctacttcctcccctcctctctagccctctcacaggggtgattgctacctctctgttttcttgggcctaggcaagttttagaggagttcccaagcattgttatgaggccagtgtgctcgctgggctgggcgggatggcctgggcttgtgtgtggcctgagggctctcctggggccttctcttttcccagtcacctttggagccacagaagcagtgcactcattggatgtctgttcttaacacagcttctctttctacattaaaaaaaatcattattgcattttggaaagcagtgctcatcaaaagcaacttttaaaacctattttattgttcctttaaatgttctctcccgctgaaactgccctggagaggctatctgctgctcttccatttacccacatcaggttattctccatgtcactcagtggagatgactccagatgtgtttaaagactggacaattcacctatactgtgtaggaaattacctccttaattacctggtagaattgtcagcagacatgttcatccgatgatagtactgcagttttctattaataatttgcagacttttatctaacctgcactcatgtacagattattaaaagttttaaaatgtaactgatcagtattgatcaatcattgtcttgatttttttttacagcgtatatttctaatcatattttttaaagccaagagaactggttgaatgaatgtttattttcctgaaggtatttttaagataaagcttcctaatggcgtgtaaactttgcatatgtatgtagtttgatacatattgtcacatttgaaaatcttgtgggttgtaactggttttatacaaaatatcgaatagtggaaattgtataattacaatcatgtaattaaaagtattaaccc

SEQ ID NO: 16563 - DNA, 507 bp, Homo sapiens
cttaaaatgcactcagtcactttcaactggaccttctggaatgtgaccttcaatgcctgggtgtaatatcctcgtgcagtgtctaacctgctgtcccttcccagcctttgaggagttagggaagcataaagggggcttgaacctgttgaattgcatgctgggaagcatcagttgtcaaaatatgttatatacttccattttataacttttaacattttatacaaaaaaaatgaatatacaaaatataactttaaaagctataaaatcataaatactctaaattattttacattatggtatattcagtcaatgaaagagttttttggcaatataaattctgacagtatataaggggacaggagaacaacacaagaccattatattcagtgaagaaggcaaaatatcaaatctgtcaacaatgtaactgcatttttatatgtatatatttgtatttttgtatgctttggaaaaagacaggaaataaacaccaaaatgttgccagtaggt

SEQ ID NO: 16564 - DNA, 2913 bp, Homo sapiens
tgtaataactagaaaatccttttgacaaaaggaataccccatttgatatcagagatacacaaaaaaccaattgagggtagtgaatgtaagaagacagtcccagaagtaaaccctcactgtgaatcagagaattcacataggaaagaaaccagatgaagatgaatgcaggaagaattgtgtccaaaatgcaaccttcagagtgtatcaaagaattcagacaggcttctgttttcagagtactatggataggcctgaatgaagtcataccctattagatagctcccacacatcacacaggctggtaatctcttcaccagcaccaatttcattttactccaggcacatagtccagatttcccaatctccttttcatccaggttggtctttgtgactggctactaagatgtggatgtccatgatgtatatcacatcccagtctgaaacataagagacttccctaataaattaccagggccctgtcacaacaaaatggatatcatttctaggacaagcttggtgccgtgctttaatgtggcatggtacaagataaagaagtctgtgcctgaatgaatacacgcagcaaaattctcctcttctgtgtctttcccagttgaacattatgtgagcaaaatttaagcttatacagtagtccccccttatctgtattttcactttacgcaatttccattaaccatggtcaactgtactttaaagttattaaatggatccagaaataaacaattcctacattttaaactgcacccgattctgagtagtgggatgaagtctcatgccctcctgctctcccatgagggttattgaatcattccttagtctagcatatccacagtgtatacactatctgccagttagtcacttacttgacattttagttatcagatcacctgtcagggtatgacagtgcttgtattcaagtaacccttgttttactaaataatggcctgaaattgcaagagcatttctggcatgttgttgtaattattccattattagtccttaatttataaattaggcacagcaagagattaaactatcataggcatgtgtatatgtaggaaaaaaatatagtatatacagggttcagtatacccgtggtttcaaacatcaacttggaattcttggagagcattccttgtagttaagcagggactactgtattctgttgagctttcacatgtttgagtctatttgtttctacacataatttagttatcttctgctaggaaggcagaaagcttctgtgtaagccaggcttaagtcaatcagagggcacaaaccttattaggaggctagagagtcaaggagaacctcaaatatgatcagagaattgtggaaaagacatcctttcaatgtaatgaaattgatagtaccacctgatacagggctttgcatgaacctaaaagtcttttggctgaatggtgagcagccactgtgcagttcaacgtaagtgtgccttaattgcacagaggtactgcccccacacctcctgacacctccatataccccagctatatctgctttaaggagttttccctggctccaaaggccattggcacccacccaagtattatgggaaacctccagagaggggagggactcagatttatatggctttattgaatccatgcccaaggcaacatcttactagttcctgtgggggtacaggacacctagatttagctaatggggtttggcaatgggaaggcaaacaaatttaataactttatgggtgaggtactttgggccagtagagtatactacagttatgtttacatctgaaagtgtagtagggattaattcccataagttatagagagaattctaattccctgtaattcgcataagtcatagaattctaatcaggaataattgtatgtaaagatacctctgaggtccaacagctctgatcattttgggcttcaagtctctctctgtgactggtgattttgtgggttgaaacttctggcaaaagggggcagcccttgggagctgggggccaggggattgacttggttccctgacaagggtaccaggtccaccccttctgaaaagcagctgttagtttactcttgggctcttttacacattggatatctcttccttgggtagagggttctgacctaaaattccactttaggagtttgtcgtcttggactcaacaactaacaaaatgaaaaggacccagcaagcctcacttgtggaatgaaaatggggcattcaggaaagcacctgtcctggccccacagtatgtcagctgtataggcaatagtagtagctgtctcttagaagggaaataatgtatcacctctttccagaacgaagcaaagttgctggcttagtagagccctcaattcatagaggttactgtaattgggcctggctcactgatgctttcgccaactgaaactactaggatcctgtgtgtgttcaaactcagtgccattaacaaacccaaagtgaagcggtcactcctctcagtggaaagagcacgaggatgttctcagctctggccaatactccatttcataaaccatgttacatttttgttaagccttggctctggatgtggcctagatatttgatattctaattggaaattacagattaaaaagcaccctttctttgtacagtgggggtaaaagtcacagctgcttagtacaaccatctgggttgctcaagtagatgcccataataagagactattttctgataagactgactggaatcaagctgccgacagctttctccatccagattgtgacggttgctacctggatccatcattttactggtatggcaaaaaatcacccatgtgacactgggtgacatggtaaaagtacatggtacttttacagtaccatgtactgtacaaaataaaggtctctttatctg

SEQ ID NO: 16565 - DNA, 932 bp, Homo sapiens
atgtatgcatataaagaatacgaaaaaactctgagctggaaatcaaacctcacaatacataaatgaacacacaggagagaactgttaacatagtgagcactggaatttcctctacaatttcagcctccaccaaatatcaaagaatagaagataaattgttgaaatctattttatatgggcattctttcagccagagcccagtcttctatggatatacagaactcacacagcaaagaaaccctataaacataatgaatatggaaaatactcttgcgaactcactcctcagaaaactcacgctgcagaaaagctctgagaaagtaataaaaatgtgaaaactttgtgccaacaatcaaaactcattcaccatcagagaaatcacacaatgacaaaagctagaatataataagtgtgtgataaactttaatgaaaagtcagtacagcagaaaatacattcaagatagagacctcatagtatattaaaacaaacaagaaatgaagttaatggatgtgggaaattcttctgccatgtcaaccctcattttaacctacacagaggtaatccctatatgtcgtataataactattgaaatgttcactagtaatcattttcacttctccctcatgccacacctggcctaaatttctcaaccactctctcatctaaacggggtcatattgttaccctctagctagtggaatatggggtcagtgacaggtcttaaatacatcagtcaaattctcaatattttcttctatccctcattagaatggaatggaggaaaaccttgggactcaggctctgatgatggaaagtacaagatggtaggaacccgggtcagagaaggatcctgtggcatggagttttctcctccctgtacacagttggacttcttgcagtgaggaaataaatgtgttccctgctgaacttc

SEQ ID NO: 16566 - DNA, 294 bp, Homo sapiens
gctgatggatggtgaggaggaaggacttaaggacagcatgtctggggaaattttatcttgaaactgaccaaacgcttattgtgtaagataaaccagttgaatcattgaggatccaagttgagattttaattctgtgacatttttacaagggtaaaatgttaccactactttaattattgttatacacagctttatgatatcaaagactcattgcttaattctaagacttttgaattttcattttttaaaaagatgtacaaaacagtttgaaataaattttaattcgtatataaa

SEQ ID NO: 16567 - DNA, 1048 bp, Homo sapiens
ccaggcgagaagctgtaataccaatattaaaaattatttatgtatcagagaactcattaagatgaggacaaatctcagactttgctcagagctcagaattcagtggggaccagagagcctgcaattggaaatatgagaaattctttgcccagagagctgccctaacagaacacttcatcctcactccaacgagaaatctacagatgcccagaggttttgaaaacttaccgtctgagctcaaatttgatcactcacaagaggattcatacaagtgggaaaccttagaaatgcactgagtgtgagagagctttctactaatgctcagcccttctcgttgtaagagaattcacaccggagaacaactttttaaatgccttcagtgtcagttgtgctgcagacagtatgaacatctcattggacctcagaaaacccaccctggggagaagccccagcaagtgtgaaaaaagcttctaacaaaactctgacttacccatcagagaagccatactggtgaaaaattgtatatttgtcttacgtatggcaaaagcattcattggagagccttacttgggtttgcacccaaaaaaaaaaacccaatctgaggaaagactgcaagtgtctgaatgaagagtgcttgtcaatgatcaactcttgtggtacatcagggaactcacataggtgaaaaaacccatacttaccttgagtctgagaaaacctttggtagaagctcctgtcttatcaggccccaaaaaacctgttctgcagtgagagatttaattgtgggtgagaatctatgtacatatgtatgagaagactgttctcatagttagttgactcatatggtagagaggactttacatgaaatcagtatgaaaatagttttttagatacccagaagcttgttctgggagaagctagggcgggtcagagtagacctgatgggtaactcaggtaaagatgcttttcttttatctgaactacttaatgattgctttacttttactttttaaaaaattcagaaatccaataaaggaaaggacggtaacct

SEQ ID NO: 16568 - DNA, 2387 bp, Homo sapiens
gcagcacctttggcattttcccaggccctcggtaaaagtaggtttggggtgactatacagagaaagcatggcaagactgcagaaacagagaaatcgggaacttcagttctggccgctgccaccgtggcagccgtctacacttcacagcgggaggggaggagtcacgttgtctaccacttacctgagacattctgatttggatgatgctagagcacagaaaataggtgagctgcatgggatcccaaagctgctgagggatagagcctgagcctggtggccacagcatatgccctttctgttccatgcagctggggctgttagtagtcattgcccttgtcagcagaccttctaccctggtggcaaacacatgaaagctgtggccctgggagtggcctcctaaaacaagccacttaggtcatctgccatctacccttaacctctgtctctcgcctgaggggaatctgcaagctgtgcattgggcttacctcctgcttttgtagaaataaccatcctttggtatacatggaggatagttccagaacgcctgagtatacaaaaacccaatgcatactcaagtcccacagtgggccctacagaacccacgtatgtgataaatcagccctccatgtacgcaggtttcgccccctgccaatactgtattttcaacctgtatggttgaaaaaaatccatatataagtgcagccatgcagttcaaacccatattgttcaagggtcaactgtatagtttattgaacagccacacccattcctttacacatgatctatggcagagttgaatagttgcaacagacactatgtggcctgcaaaatcggaaatttttactgtctggccttttacagaaaagtttgccagcccctgatctagaccagcagctcatctgatagaggcagaggtggccttaaagatgtggccttcttcattttctgttggtttggtttcgtttctatgagagatttcctctgatagctctgctttccccagcacttactctctgagcttttaaatgttctctctgggagcttcatataagctcggtgacatttgagccacagtttttagatcagcacctggaatacatgacacattcttactgaggtcatccagcactgccatggtggctgcccagtcttctggccagtgtgccaggcacatgtccctgtcacacaggttccaagaaacacatacgcagccatgcatagaccaacagatttaatattatattgcagttttcagcgatgcagaatgcagctgcaattgtgttttaaggagaagccaaatggggatggttgtccctgcaacatggtgccactcctgggccatgtgcagcctcagtggacactcttccatagcgctgaggccctggccccgcctccagttaccctgtactgcccactgccttacagttcagtgcgcaggccttcaccttttcatcaccagcctctctgctcagtgctctggagttcttgaccttgtcctttatcatgagatttgctgaaatcactaatgaaaataactcccaaaagcaacaaacaaaaatattagtttaactggcactgtggtatattaaaaggcacaagggcattgtggcttaacacttttgctggatcccaagagacgcacatgatgttaaaaagagatctggcagcagtactaatactacatttcagtgtaatcatcttggggtggtttggccaggatttcccaattccttgatatctggagtttcttcaccattgtccggcatcctgcggaggcttaatatacaggcgtaaggtcagcagcaatttgtctaataagtgatgagatcagtagctgaagtctctaagctgggccattactaaataccatagccatgttgatctggaaatttatccctctagtgtcttacctcacataagccatttgcccactgtgcaatatagaaaggtgttttcaaaagtatttggccgtagattttcacatccatcataaggttggcattcaataaggaaaaagttctaactccagtattaaattgtacataaatcccaaatgttcttaaagaacactcagggacatgtttgttgcctgggattggtaatgaaaggttggtttttgaaacttgaaatttcaccattggtttttttcctatcatttctgcatatccagcaaaaggaatctcatgttgactcctggcagagttcagtggcttcagtctgtctatctgttctgaggggaaaattgtgttctggatccagtaatcaatttggcaactttaatcgaggttttcaaaattccaaggagggttaataaagaatgataatcagttttatttgctaatagctaagacaaatttgtaataaagtgttttataatacttcaaaag

SEQ ID NO: 16569 - DNA, 529 bp, Homo sapiens
ttttttagttcagtgacctgttttatagaattttatatttaaataaaggaaatttagattggtccttttcaaaattcaaaaaaaaaagcaacatcttcatagatgaatgaaacccttgtataagtaatacttcagtaataattatgtatgttatggcttaaaagcaagtttcagtgaaggtcacctggcctggttgtgtgcacaatgtcatgtctgtgattgccttcttacaacagagatgggagctgagtgctagagtaggtgcagaagtggtaggtcagctacaaatttgaggacaagataccaaggcaaaccctagattggggtagagggaaaagggttcaacaaaggctgaactggattcttaaccaagaaacaaataatagcaatggtggtgcaccactgtaccccaggttctagtcatgtgttttttaggacgatttctgtctccacgatggtggaaacagtggggaactactgctggaaaaagccctaatagcagaaataaacattgagttgtacgagtctg

SEQ ID NO: 16570 - DNA, 243 bp, Homo sapiens
ggagcctccctcatgtctttaaggtagcatcattgatctttggatgtggcttttggattttctgaacaagctaatgttgtgtcgagaagcaacactttgtgatctcatggctttgattgatttgggctgttcaaaatgtttatttgaaaaacgtatacattaataaacttaacaaagagatataaaatacagagaaatcaccaaatgctttttgatctgttgatattaaagaatcaaaaggtg

SEQ ID NO: 16571 - DNA, 591 bp, Homo sapiens
caatgctcaaccataaagttgtggtccaatggaacatacagcttaatagtttatgcgtgattttctcaaaatattgtaaaacttttgacaatgctcattaatattattttttctatttgtagaccatatctgaaagaaataacattttttaaggctctaccacatagacaatatcatgctagaatgtgtgtgtgtgtgtgtgtgtgtgtgtgtgtatgtatgtataggtcggggagaggatagtggtgggaacagacaaataaggaagcggggaggactggataattggttttcccccctaagaacatttatttacgtcttaagagcagataagtgactaagactgaacacatacattttgtggagtatatagttttcttgtaaatgctgttcaattattaatgtaacagtagcatcaaaattttattcaggctttagttgactcttttggtcagttttaacaattctccttaaaagatattttggagtgatgaatgtagtttacttttgtatttgaattttgattttctatttttattttttaaatattgtatttgtgcacaatgtacattaaatcattattacatgctt

SEQ ID NO: 16572 - DNA, 3115 bp, Homo sapiens
gggccaggaccggcgtgacagcctccaggtacgccgcagctgcccagtctcgcctaatctacctagatcagcgtggctggtccccttactgcctgcttcttagggccctctccctgccccagctttccccgaccaatcacgcctacagtgctttgaaggtttcctctcctaggctagtttcaaacaggccctaaacaagtctgctgctgccctctcatcagacctccgcaccctcaccccaccatcacttacactactttaatccagttccttcaaagtgatacccccacaggtaagccctcagcatcctgaatacatcatccgcagcctgggaaccttctccctcgtacagcacaggaacctgacacatagtaggcacacagtaaacgtttgtgaatgaatgggagtcatccagtcctgactcttctgtctcttgaggtcccttgaatcttccgcttcctccccaccgatttcagcgtgtccacatcacagctccctccagaagctgcaagagcttcttagcagttcctggtctgaaccctctcccagtcctcatcttccaccctaaaactagagtgatcttcctaaaacttcacttaacccctcagctatgaaaaggcttccaggagtttccatgaaataacaaaaaaaaatacaagcgcctcaccttagcattcaaggcttgtctagtctgcccaaaattacttatcctcacctagctcctaccactcttcttagagactctccagtcagaaatgtgtcgcatagttccacctccacacctctctgctgccagcacattcatgcagaaaagtcttttcacctgtctcagtcttccgcaggcttacctgcgccaggaagtctaaccaaggaacaagaatctcactatcagagccacaaatctgggacctgtctttccaactaaattggaggctttggaagggcagctttgtcctatactctctccaccctgaaaagttcccagaaagccccttccctcccaagcagtgaattaataaccagcaggtgcctatcactgagtaacagaagagctgagttaggcgggcctcacaggtcacccagccagatctcatctggggagtctgaggtcctgaaagaaagcagagctgcgtaaagttaccccggggtgatataggggggccagacgtgtgccccgttcacccacccccaggcaagcatctgacctgtcccctggcccagcccttaggcccagctttcaacctgcttactcatttctcaggggattttgggaaggaatcagcaggtgacagttgctaagcaaccaaagggggtggtgtttcccaactgtcttgggacaaaaagggtaagagcacccttagatccagatgttgccaaggaaacccagagtgcccagctgtctggaatgaagtgacagaggtagaaaacagtaggccctcacaggaggccaccttcgctagcagggagtgggaggcttctttccagggatttgtgtctccgttctgaaggttctgcgtcctgttttgtcaattccctagacggttttgaagttatattctgttaaagcatcttcataggtgcttggtgggaggccaaggtcgccgaatcctcgtggtttaaatagactttcagtgcattagtttgaaccatataaaactgacaattttcaatagtttttgagttaaaaatggcacttttgatatgagacaatgtagcagaataccaggcagacagaaccttgcaaacaccttaacttctaaccaaagactttaaaactctggctggacagagttttaagcactatgctgcaggaatcctgagaaaaaggggaaattaattctattaggaatggcccaaactgaattgtgacaggcagagggtgttcctgacagagggaagatgaatacacttgaccccaacatttctgcccatccctgatgaccaagacctcttcccagacccacagctgcaggggccaagtaataacagctcttaatagtttataatgcactgttttaatgctttacgactaaactcatctgatcctttcatcagccctagagggtagaaagttttcccaattctacacatggcaaaatggagacccagagtcacttgcccaaggtcgcacagctagtggtggagctggagtctgggcccaggctgtgagttccaggtctgtgctcatggccaccaggccctactgctcagggtgaatgcagctggtctctggccagtgcctggtgctctggcccctctcgtggagctactgcccatgatgctttcctagtgcctggttactctgcgagacttgagtctacctttggactgccttccttgggggtctgagatgaggccttatggcccagaggggaacttgattcaaaaatttgggattcatgtagcagagacagagctagactgtaaaggtcacaaactagctgtgtcaaggcccgtgatagccagaaagcggcagtttcagtccatatcaattgtgtgaccagggctagtcactttttacttctcagtgccatctataaaatggggataatagcactacctaccaagtgctgtgaggctcaaatgagccaaaggttataaacttgccttaaaactatagtcctatacaaaaattagctgggcgtggtggtgcatgcctgtaatcccagctactagggaggctgaggcaagagagttgcttgaacccaggaggcggagattgcagtgagctgagattgcaccactgcactccagcctggggacagagcaagactcttgtctcaaaaaaaacaaaaaaaacatatatactgctgtatcatgccaggatttatcagcattcccaagggagcttgcacggtactgaccgagtgctgagactactggtattcccagctgccatgtggcagcagcaggagctactagaatattctcagcacaggaatgaggcttccttggtttccatgtctgtaagggttactgatcacttaccttcttctctttcagacttgaatctgtagacatttctttattgatatggcaaattgcttgcagatatttttaaatgacagcaattttctaatatttggtttaataaaatgtgaataatgtccctttt

SEQ ID NO: 16573 - DNA, 396 bp, Homo sapiens
aatgtcatggaagcagaatcgtacagtatgttcccttctgcatatgctgctttctcactcagcatcatttccttgagatgcatccaggctgctgcacgcatcaatagttcattcctggctgggcgcggtggctcacgcctgtaatcccagcgctttgggaggccgatgtgggtggatcacaaggtcaggagtttgagactagcctggccaagatggtgaaaccccatctctgcaaaaaatacaaaaattagccgggcaccatggcatgtgcctgtaatccctgctactcaggaggctgaggaaggagaatcacttgaacccgggcagcggaggttgcagtgagccgagatcacaccactgcactccagcctgggcaatagagtgagactccgtttc

SEQ ID NO: 16574 - DNA, 578 bp, Homo sapiens
gcagagacctctgccctcctcaccctcagggacaccactcggctccatggggaggtttagaaccaaaccacaagtcccctcaaggacaaccactatttctatattttttaccagaaaacaaaactctccatcgctgaaagagattccagtgggacatggtgccgtttttctgtttgccttcttgcaacaacagtttctgaattgactttgttttcagatgatgccttctgttgaattctgttattaagggcccatgatgagctgtaacttctcaagaggaaagaacacagtagaaaactagagctggaaggatctaggttgacctgtctgtgattttcaaactgtggtccagagaataggggaagactgggccagacgcagtggctcatgcctgtaatcccagcactctgggaggctgaggtgggcggattgcttgaggtcgggagtttgaaaccagtctcaccaggcgcagtggctcacgcctgtaattccagcatgttgggaggccgaggctggtggatcacgaggtcagcagttcgagaccagcctgaccaacatggtgaaaccccatctctact

SEQ ID NO: 16575 - DNA, 342 bp, Homo sapiens
cttggccacctcccctccccacagccttcctcacccttggctggcagacccactggaggtcaggcacggaccagtggcccagccctgggtgtcccatcaccatgtgaccttggacatgtcccttcccctctctggccctcagtttccccactgggacattgtgtgctgcaaagccattggttgggctacttcttcataggcacttacttacccagggatgccaccctttcgtcacctcttccacagagcactttggcatgtaaacaagcaagagcactgcctctatagggtaacctggaacattctctaggttatatcaatataaaacaatgtaaatggtgg

SEQ ID NO: 16576 - DNA, 2500 bp, Homo sapiens
gggtgggaggcctgggcccggggcctcccccgtgacagaaccacactgggcagaggggtctgctgcagaaacactgtcggctctggctgcggagaagctgggcaccatggctggcctctcaggaccactcggatggcactcaggtggacaggacggggcagggggagacttggcacctgacctcgagccttatttgtgaagtccttatttcttcacaaagaagaggaacggaaatgggacgtcttccttaacatctgcaaacaaggaggcgctgggatatcaaacttgcaaaaaaaaaaaaaaaaaaaaaaaaacaaaaaaactagacaaggagagaggcactagaactccagctggaagtcacggagtggctcgagcagccttgggaagaggcaaggagcttctgaagaaactgcctctgcacacacatcactggctgtgacccctcaggctagcccttctccactctgggggaggaggtgggaagggccaccaggcccccagctgccaggccagctgaccccagccttcctggaacagggagtctgcaggagcgcagacaggcacagccctggagcaggcaggccgagggctgcggcactggagcaggctgacttacatgctccacatgggacctgtgtcacccaatgagatgtttgttactctggtaaatgccacacgttaacacaataacacccattcctgggaccgtggggatttagggcacgtcactgcagacacgctctgcagcattcaccgacagtctgtcatgcacccaccacgttggccatgtccttgtgttcctatcggatgctcccagtaaccagggggaccacccgagctaatcatggaatgtctgttcccagcaaacacgataaagaaagattgtgcactttaacctctctcatcagggcccaagggctggctgggattttttttttttttttcccactaactttgtttctgaccaaagtgaattggaggcactctgctaaaagacatccccgtagacataggggagagagttgctggctgagggcttcccttggcttccagaaggcagccttccatccagacaagccagtgagctctccccttgggatcactggggtgatcagtcagcagattgattctcattcataagatcattcctccctttaaattgagcccctaagagcactggcctgggagtcagacagacctgggttcaagtcctcagtcccctgcccactccctacgtgactttgatcaggtcactagtgtctctctgagcctcagtttcccctctgtaacttggggttgaactaaaacacctgtcctgcctacctcacaaggtcactctgaggattgaaacttgatcttgtccaggaaagctttgtaccaaacagtgaagccgccctgatccgtgaggtatgagtatgactctgaccttcagccctccctacagccgggggtgtggcccagagaagcttccagcacagccctctacccagaacatccgggctggagggaggctcccagtgacttttctgacattcctagacaggttcattctttgctcaagaaaggcctgaatgacaatgtccaggatgtctgcacaactgagcagctcgctcactccctaaagaaacctattggcagcttcaacaggcaggcaataatctcttcccagaaccactgcagtcaggaataaactgttttctccaccaggctttgacaaaagggcccacaggaatcttaccaatgccaacatttcaaagcaccctatttcacgtagcatagctttctgctccccttccccaaagagaggttatggaggtactgtagcttttagggaaaaaaaaatgttaacacatcacaggtcaagttgaagtcattctctgtttaggcactaaaaatcggtgttgtcactcactgtgtattaccagtatttacttgctttcttgatttcaccaaaaccaaatttaatttaaaggaccacattaatttttcaaagggaaagagacaattaattgtacataatgtatacacacacacaaaaaaaaatacctgtagaaatattattccagcatagcaggaaaacaaacaaaagtattggactgtcggaggtgagcctgtgcgtctgtaaccctttgtgactcctgagcgtgcgctgtcttctaggttaactcacgaagtacattctctgtcttactgatactgtaggttcacccatttttttttaatttcctcgcaaataacaagacccacagaagtgactctagctacttaatggttctgttcttttatatgcagcaaacacaccgtccatttctgaagaggcttcggcctgaaggcattttccaatgatgttagtgcacaaaacgctttaaattagactggaactgccagaatcaaatgtaaatgaggaatttctcgtacccctactgcatggtatcgatttttaataaattgttgcaaatttgtttttatgaataaaaggaaaaaacctgtcgtcttt

SEQ ID NO: 16577 - DNA, 4509 bp, Homo sapiens
tcctccttcccgcagccaccagcgtgagctctctgaatcccgggaccccttcacgtggccacagccccagccctgcccccgtcacactgctgtgccttagtcatgttgttccctttgctcgggatgcccacttcacgtcgacggcattcattggtagtacttcttgctgcaacaaacttcaacacacagagacagattcccatgtaacagtccagtgggggtgcttctgcttggcaggttggttcacacagtgatgcagggactcagctcctttcatcctgtgctctgccctccccgggagcctcagagtttgcttctggctggcggcaagggaaagggacgatggagaaggcacggctgcttcttacctgccttgctcttaactgacacacatcactcctgctcacgtcctcttggccactggtagtcatgtggccccacctggatgcagaggaggccaggatgtgcagtctccacatagtggcttcccagcaacaacttttgacttagatggggggtatgtattatggtgagaggttagccttcctggcacatcttcccttaaaacttctaacttgcccctcctagtccaagtcacctctcagatgaagtcttttttgaccccctttcagccactgggtcccttagtgctgtgtatgtgactgctgtagcattccactgcacctgctgcatacagcttacattggagatgtgtatgtcaaacgcatttttctttattgcaaagagagtctattatagaaggaaagaagtggaggcctgctgtgtggatcccttcttcttcctagctttcagtttccttatctgcaaagtggaaggtcagaccagatgatgctctggtactccacagtgctcacctgtatcactgcagggctttctgcactgaaagtggaagcagaaggctaatgggtcacattgtgtaaaggtctctggtgctcaaagtttctaggcaaagaagtgaaaatttggaattttgtctacatcctattaatgctgtgttcctcaaaagggaattggcttgtgtagtttcctaccatatcatattttattaaattagaggggccctgacttttaaaacccactggctttctgaagtgttttccagtgaatgactcattcagccagtgcttgttgcatttatgttagctaccaggtgccaagtgtgcagacacaatacagagccttcaggctctcgacaggcaagagaacacctgtaaatagatggtcccgacattgagaggcagcatggtagagtgggcagaccttgtgctctggactcaggttcaaagttcagatgaagctcaatggcctcttagttggagcttagaaccagtatgcccaaagtgctgggtctgcaggaagtacccagtcgatggtaggctgcacagaattctgatctctaccttgagccatgctgagccacaagttggtctccttgggaggtgccatctctcatctgtccctcccccagccatgaaagcccattcccctatgctggctttcagaggctgtcgttaacttactgcccagagcctcgtagttttcttcccctgccctgatggttgggtgtttttcctttaaattctctcagccttacactcacagaagccaactttccacaggactgaagacaaagtgtttcatttagctgttactgatagacacctttacaaaggttactaatgtcccagcctttttaaggagacacactcattcatcccctactatgtgctggcagctttacctttgtcatttcatcctcatggccaccctggaggtggcattgtgtaacctcatcttgcacattcgggaaacggatgcttaggagagggaagcagcttgccagttaaacagcccagaaggagcagatctggggtcagaaccggacctggtgggcttgcaagcctgtgccttttccactaactcctatagactcctggagctagaagcacttgtgattcttgttttaatttactgatggcttcaggggttaacagtaggcctagaattgtttgcctctgaaattcatggcccctgacgttatgtgctttgaggttttgtgcctgctttttgctgtggtcctgtttttttcataacaatatactggtatagcttccactcaggtaagtttgattgaacaatgatacacagctgcaccggggggtcaccttttcacaaatgtagacctccatgaactcattggatgaccctggacagagcggggctattcccattttgcagacaggacagcagaggctccagacaatgcctttcctttctttttcactggactcaagtgtccaaggcttttcatcctaggaagtttgtgtgctggttcacaagaggtccctggcaccctttctggggatgtttggatgcggctggtaggcagggaagagaaagggcaccccagcgggggcatgtgtggaggcagcacggaacatgtaggttatagatcgtcagggaggaggggtcagttgggtgcttgtttttctgatttttggtccttgatcacccccttcccttcccacacgtgtccccagcctgcctgtggctgttccccccacaagaagcacctcccttgcttggcaaccttcaccagcatttcccaaaagtatgctcctgggaaccctagttccacaggataataggtttttcataaagaaacgtagggtgtgtatgtgaaagtggggtgaggttccctggttgagtaggtttggcagacactaaagcgagctacacgatcatctttgctacaggcctctcacaaccttcagcatgccagcatgggtcaggcctcttcacagggccaagaaactcatagcatctcccacattactctcatcacttctccaaggtgcttttgcaagactggaattccttggacaccattggagaagccccgctttttctggaacagcggcaaccaagaggccttgcagccctggaagtgggtcagggcccttggtggtcacctttttctccccagcagctctgcagaggtggcctgcttggcagtgggacatcaggggaccggtcctgctttgagatggcagggtccctgttctgagagctctccagcctgagggcattgagctgaggctccaccctgagctctcctgcagggtggagggcattgtttcccagcacccaggcagtgtcttgctggtgtgtcgtgagtgctggatgtccaagtccctgctggccacggagggctcctgcctctcttcttcagcgccacaaaattacatggaggccagctggttttgtgaggagattgtttattttttaattcttttgtttaccgaacgtttactgagcatctaccctgtgccagccctactcgtacgctctgtctccaaagatgaaaaaggacttctctgccctcaagggaaccccacagtatcttagaggagacaatcatgtcggtgagatggtgtggtgatgaagcctgctgggtatacagctcagggaaagtcatcgatgatggctcaggctcagcctgggcacgccccagaggagagagatggagtggggcctcaaagggcaggtttaggcagaaaagaaaaagggcattccagctggggcatgtgcaaaggcagcacgtaatgtgtaagttctagatcgtcagggaggaagggtcagttgggtgcctgtttttctgtttttagtcctttaaaatgagtagaagcaacctgttaccctggaaagagcactggacatagacctagtgctgcgtgatgttgagcacgtttcttcttccctttgagtcccagtttcccttttggttacagggggatagtagcccccagggatcatgtgaaagtgagaaagcccttttcacactgtggagcggtgcagatgtgggaaacctcaaagatggttgcccattttaaatcctttcatctctcatctctctttcttctctcccttctgccctgacgtagccatggttgggtgggtgaggccagaagaaactgcctccggcaagaggtagcagccgctcaggtggctctgctggcatcggagcccacagaagtgaggagtggccgatggacctgccctccaaatgtgcctgactctgggtcttgctgtcactggatttcctggcatggcagacagaaagaaagatagtttgaccaagtcgtagaagctgatccagcgggtaaaaagggggcagggaactcgtcccttttattcttgcctcagagctgcctgaagacatgggccaggccggaggctggacaactttggataacgctgacctgtacttccaagtaaatgcctcctgaagagcccgggacccttcctgggagaattctgcagccagaatgaaggtgccatcagcaggaggcactgtgaagcaccatcctgtcgctgtccttgtccattcctagcaagttaatcgtgtcttgttaaccagcagttcctgttcaacgtgtaaagagacctgatgttttccctaataaagctgataacagattttgcagg

SEQ ID NO: 16578 - DNA, 1508 bp, Homo sapiens
tcagattgtttttaagatctccattaatgtcatttttatggattgtagacccagttttgaaaccaaaaaagaaacctagaatctaatgcagaagagatcttttaaaaaataaacttgagtcttgaatgtgagccactttcctatataccacacctccctgtccacttttcagaaaaaccatgtcttttatgctataatcattccaaattttgccagtgttaagttacaaatgtggtgtcattccatgttcagcagagtattttaattatattttctcgggattattgctcttctgtctataaattttgaatgatactgtgccttaattggttttcatagtttaagtgtgtatcattatcaaagttgattaatttggcttcatagtataatgagagcagggctattgtagttcccagattcaatccaccgaagtgttcactgtcatctgttagggaatttttgtttgtcctgtctttgcctggatccatagcgagagtgctctgtattttttttaagataatttgtatttttgcacactgagatataataaaaggtgtttatcataaaaaagaaacagtattagattttggtctccataatctattttggtattgttacgaacatggatatgacaaccaaactggaaatcagaacactagggtaaagtggatattgaaatgaagcaagaatattgtcacacatgtgttgtgcatcttgtttagggtatatttcttaatgtcatctaggtcattagttttgttaatatttgtgttgtcttgaccaagctcctactaagtataggacacaaatgttttttatcttccaaggcctggctcaaatgccactgctgcaaagctttctttgaccctctggccacctcccaagccagaagttatcttccccctccatgtactctagccttttcatgacactgatattttcgtgacactgacttatagttcactgtttacctgttggtctaacagcaaatcataaacagtagttttcaacatacttctaaggctaaattcatttccagaagtagcaaagcttactagccaaaggctccacatttatcaactcttaagagctagacttgagagcctaacagcctatatgattttgtgtaaattgatctctatacctcagcttcttcatctgcaaagtgagataattgtactattctactttcctcatagtgcggttataacagattatgataatattacaaagtacttaatacttggcatatagtatatatattagctattagtattttgcaatttggggatattgaaaattagaaattgcatgttagttcatgctgcactaccatattgttcttttggggctcttcaatgggtgaaattccattttacagtttatcatgtgcatctgtatcacaggagtattttggcaaaatgattctgtaccaaaaaggagtactataaaatgagggtgccaaatatattgagtcttttatgggattaaaagttctgttgcattcc

SEQ ID NO: 16579 - DNA, 3431 bp, Homo sapiens
aaacttgaaaaacagtttgtaagcctttcaacagcagcatcaacctacgtggtggaaatagtaaacctatattttcataattctatgtgtatttttattttgaataaacagaaagaaattttgggtttttaatttttttctccccgactcaaaatgcattgtcatttaatatagtagcctcttaaaaaaaaaaaacctgctaggatttaaaaataaaaatcagaggcctatctccactttaaatctgtcctgtaaaagttttataaatcaaatgaaaggtgacattgccagaaacttaccattaacttgcactactagggtagggaggacttagggatgtttcctgtgtcgtatgtgcttttctttctttcatatgatcaattctgttggtattttcagtatctcatttctcaaagctaaagagatatacattctggatacttgggaggggaataaattaaagttttcacactgtgtactgtgttttactgattggttggatattgcttatgaaaattccatagtggtatttttttggattcttaatgtgtaacttaaacatactttgaagtggaggagagtcataagacagaacatttggcaggaattgtccttatgaaacaagaaaaagaaaatgaaaagtattattaagcttctgtgtttgtctaaaaatgtggcatatggatggcatttaaaactttgaatgaattatacctaaatctgggacagggaggtgacagtggaacaggctaccaatcagaactagatgacttttaaggctcctcctattatgagacttcaatttccaaagagaagaactagcagagaaattgtatttcagtaattttaagctccttctgtcttgtagagtcttgttatagttgtataaatcaaaaacacagaataaggaacatatttaactttttttcattataaaatggttagaggaccctaccccctctagattccctgatttccccaggcctgcagcatacagtaagatgggtccctgtgccaggcctcaatactgccagggaataaaaccagagggagaggaccctcagtgtcatatcaggaagcccagtgccagaggacagacaggttcaaaactggcttttcctctgggcctgggttggtgctataggccaagggtcattttatacttgggtataaatcaatcccagtttgggaaaagattatttttaagcttaaaaggctgacatgtgccattatatgtagtatgtaatatatgtaacatcttccaattcttttaaaataaaattaatatttataatggatatttaatgattgttatttttaaaaaccagcttataattcctcgttatgcatgatttatccaaagtttccatagttttattcaaaataataaatgttaataaggtgataaggggtatatttaatgtattgtatcaaattgtgaataagaaagtaggatggagctttctagaggttgggccttagttctgttatcctcattgcttttaaccaataagttaaatgaagttagagttatggtcttcaggttagattatggaccagatctgtgagggtcagcatggaaattcacattcaacaaggtagcacacaggaccaagagcagcacatgcaatcaactggaataatatagtaatcctgtaactgggtttgaaaaaataatcaacaaaagatacaattcaagggttaggttgcagagagctggcttgagagtagttattatgaaaaaggcctcaaggagtacgtgttcagtatgctctaagatgataaagtggctgttaaaaagggagttgatttgaggaagtattacttagcattcatgcatattgggcttaggctctagccctgccactatcattgtcttctctggactgtgaagtcactgaggacaaggaaactaaatttaatgtctgtatcactagtgcctagaatttctggacacttagtagtcaccatcaggcgtttatttaatgaatgagaagcaaagtgaccttggttacttttttaccctgaggggctcagcactcattaggacttggtgcctaattttataaaaagtcactaagctcaagtgcttggatgaaaggacagcgtggataaaaaggtttttaaaacatggatgttaaggctgttttgcttggagaagacttgggactgggacagtctttagatattatttgaaatgctggcactgtctatctggatcccagggcttgaactaggatttgaggaagtcacagggaagcagatttcagtctgacatttattcagtgcaagttttttggtgctgtagtatatgatgaaagatgtaaagctgaataaagcattatttctgccctagagttgttcacagcctagtcaggcatatggatatgtaaacaatgactgtaacgtgttatagatgtaaagacaaaataaaggttaaagagggcataaaggagcactcaattgcagagatttgaggacattatttttattttgagctttaaaaagatgaataggtgttctcaggaggtagggatctggctgagagggaataatctgagcaaaggtatgaaacagcctaatgcattagagaaaaaagttcttttagtaaggcatttggggttggggaagctagaaaaagaaatgggagctggtcacacagggccttgtgtgccagactaaggggtttgtagtatatattgtaggcagaagagatccatcaacagattgcaagcaaggaagtatgttcactttaaagtttgagaaagaatagtgtggaagcacgtctcaaatttagacttgttccccctctgaaccgtgaatcagaccatttcaggtagaagtcttccccggtttatctgatctactcggggcctcaggcttctcagctgggaagagaggatgcaagaccagactgaagaacacggttgagtccccagaaccaaaagggggcctttctgcttcttagccagctacctcttcgagtttttcaaattgtgagggggaccataaaaggatggaaacttttagatgacattctacaaattatttttttctttaaattaaaagaacctagccaataagatagagaatgggcatctaaggcatctcagagctctctgatgaagccaggttgtcaaagatcatttgcaaaagaagggaaaactggcatgacaaaagctacagagaggagagtgaaatatagaagtgtttgaaatgttcaagctcacaataagcttaaatttatagaaaatgctaaggttgtcaagaaggcttttttttttttcttttttaaacctgagggcaaaaaggaatggataaagtagtgtaatggattgacaatcaggaagaacagaataactcagttttttttctcctacaaggagatatggctggaccaaaataaaatgacatgaaactgcaaaaatgaa

SEQ ID NO: 16580 - DNA, 103 bp, Homo sapiens
agaggccatagtacctcctgtttgaagttgtttattcacatctatcttatttgaagaaaaagactgatgtaatagatctttgtcattaaagctgaacttttaa

SEQ ID NO: 16581 - DNA, 1641 bp, Homo sapiens
gaagactagatattcctagaaaataaagaagcaaatctctttaccgggaccttctctcaattttcatggcggaatgtctcccccagctgccacacacacattttgtattaattttaatgattaaaaagagcatagggtaaaaacctgatatttcacttatactgcataacaagctaaccaaactggacatggtgaataaatcataaaacaaatcattttacttattatttacatgacttttctttccatcaggtcttctaaataggactgaggtatagtacactggcaaaaataagaaaaggcaaacaagaatagcaccaaagtaacagatataaaaccaaataccatgtcagaaaacactatatagtaagaatttatcagattagagcagcaggagaaaattaatactaaattataatcattttagtgatatttttcaacttcaccacagtaactttgcaacatcatttttcatttgtggggtagtaaaattcatgtcaaaaaggaaagaaggaatggaggaggtcagttagttcattgcaataaattacctcttcagttcttaaaaacatgcccattggcacataactgagacataataactaagactggaagagccttggtttaagttatgaagcaaattaaaatggaaaatacaagaaaatagaaccaattaggttgaaaatgccccttactgaaaatctgtattaaaaataaaattaataaaagtaaaaaataaaaatagaaacacaactctactagtacaggctagcctggggagtttgataaactgagtgattgggtcaactatcactgtacttccataatgaatttcttcagtcatgttagagtagcacatgaatgtgagctctataaggacaggtactatatttccgtaagacccaatagttactgtacatcccataaataaaaaatactttagtttgctaaccaactgaatatatgaggactgcatgtaattcaaccacatggttgtttgctgtacagtcctttgcaaatattaaaaaattttttttgctataaggctttgatcatatagtcctcatagcaacataactaccatctagcatgtaccacattttgcaagactttaagttcaacattccaaactgccaatttgtattatgtccaaatgcagtatccttgaggaatatagtgggtcagttaaatatctagagacatacaaacatctgctaattcatctcattgagatggatcattctgatctccatcatccacccacttttcatcagcttctcctacttcattctcctcatagtctttatcatgagggattctgtatcctgtctctcatctacacttgctggccttcctggttgtgatttattggaacagtctacacaaaaaccatagggtcaagatccatgtcttactccaacactggctgctaacatgatcttacataccatacatttgcatttttatccttcttgtgcaccaagaaatgttttcttacatgttttctccaagtgtaaaaagtcacagctaaatgatctcactcctgtatgaataagcaagtgcttttttagtgtttgtttgcatttggctgcatagctacaatgatggcattttaacttattcatgattagagatgatgat

SEQ ID NO: 16582 - DNA, 499 bp, Homo sapiens
gcaattcggaagagaaacacattgaaatcactgtctttccctgagcaagggggctgctcattagatcttttgatactttaccatgtgaaatactaccagaactgttctctaaacccactttttctgtagaggaatgtatcatctttttttttctcatattacaaatggacaaataacggactttctattttcatatttgctgaaaccattttttaaatgaaattaggtcattatttatgaaaagttttgagagggcactgtcaacttgggtttaagacaggaggacattgcaagttcacacctttcataagcataaagtagttgcaagaaagtattttcatcctgttaggattcatatctaagatagagttatgcattgcacatacacaaataaacttttattagatagatacctataaaagaaacataaaagtatgttgtgtattactgacagttctagattaatttcttttagaattaaagtagatttgttaaagtg

SEQ ID NO: 16583 - DNA, 432 bp, Homo sapiens
ggtccaatgcccgccagcctagctccagtgcttctagtaggagggctgaaagggagcaacttttcctccaatcctggaaattcgacacaattagatttgaactgctggaaatacaacacatgttaaatcttaagtacaagggggaaaaaataaatcagttattgaaacataaaaatgaataccaaggacctgatcaaatttcacacagcagtttccttgcaacactttcagctccccatgctccagaatacccacccaagaaaataataggctttaaaacaatatcggctcctcatccaaagaacaactgctgattgaaacacctcattagctgagtgtagagaagtgcatcttatgaaacagtcttagcagtggtaggttgggaaggagatagctgcaaccaaaaaagaaataaatattctataaaccttc

SEQ ID NO: 16584 - DNA, 554 bp, Homo sapiens
ggtgccaagagatgcctttctgaagttggccacttcttgaagattcaaatatttatctctttatttagacatggttgcctgcaggtatttcactgtttactgttgttagagatataggcactggggcagctgaggaacctcaatatgttaagagccttggctttggtagcctcctggcaggagcagcagtttgccacaggtccggacctctccctccacacagccacactgcctcatgcagtctgacccacccagtgagggtgcatttgaacactgattatattctccatttgtttttaagctctgctttgtgttagagcttgtgactgccaaaaattttgtgcacagtgatatgactgttttaggatcttaagggtagaattttgtgaaaggtgagatcctttggaattgagttctttctcattgggtatgaaaatggatgtatgtttagaatatatgcccaacgaggcaggaccatgtggatagattccatttgtttccttgacctgatgtaataaaaactgataaaagccgtgcagtgcccggcatcttgg

SEQ ID NO: 16585 - DNA, 3821 bp, Homo sapiens
gtgaccacactgcttccctttctcagttcctgaccttcctctgagcccttgagacactttgtaatgctcttttgtaactatcgacaaaggtgtggggaagctgaggtctaggtcttcttaaaggtcaagtctgctctccctcgcctaaagtgcagcagcagctcctctcaagctcactctctaggtctccagggtaggagtgtttttctagcaagaatcttagtcaggagtaagctctgtgcgagagatctgtgaataaccagataaccccagctgccgttaaccttttcaccaggtgccacagtaatatttctggtttttagccctttctctgcactaccaacaagagataaaattgttactcacacttatgtcttactgggttgctggttttcatcgtaacacagaacgaggttatctagggttgtagcttttgatacaactccccgatctagatttattcctacattctgaatggggagcaggtaagagcagagcacctcccactgggggtggggtatttaaaaattaactcattagtatcataaacgtcaaggattgattggaccaggcaagagccatgtttttgagaaggttctggatctctgactccatcctgactgtttagtaagagcatgcttacaccctactgtgaaaaggggaggggatgtggtaagcggaaacagaagacaggcagcagaggcattaaaaatgcataccatgctttcagaacaaaagctctgggccagaaaggcaatttggctaaaaaatgaataagactacttctaatgtaactaagcatctccactatggtgtgtgccttttataaaggaaaagagagaaaaaggcaaagcaaggttgtggccttaggttggacctggaatatcccttattgcctataatggaatatgtgacactgtgggtgaaatgttctacacaccacacactaggccattttcagatcagcagtcacccatcgcttagcatagaaatcccaaaacctccagcccgggaacactataagcttcgaccattcaggaatctgccctgcactttgcatatctgtatagaaaatcaagtcaatcccccatcctcacacccactcatctctgaggagctatgaactggttttggtccctctaatgatcctccagcctcatctaatgccccccaaagactgatacaagtaacctcccctctgcttaggtgtcactttctcagcatatcaagtttaggcagcaagggaaaggaatatgggtcagttctcaaatgtcaatgtagataagagtcatctagtagagaactcatcagagtgcggattgccaagacccttctccagagattatggggttgggggtggaggtctagaggtgagctcagaaacctactgttaaccaacacccccaagtgactgacacaggtggtctaaaaattacttttctagaaacaccattctggaagtttggctgcccacaggcaggaggagaagcatgaagagaaaacctgtttgagaagttttgttttgttttgttttgctttttaataattttagcacacatctgctgactctccttcaacatcctcacccccacccctgggcaccatttaggacaagacttccttatttatcaattacttgatttatcttctcaggactcattgttccacccccaaccaatttgaatgcctacaataagttcaggagctgtgccaagcactttcctcttttacagctggagatcactggaaaggtgtctcagtcacaaaacttctccctctactactggatgaaatgtctgcatttccaccaaaatctacccagtcacccagggaataacaacttaagctgtagttagataacacctagtgattaattggctgagaaaaccctggagtggagggaggctcagagatactgatatggatgtgggagggctctaaagttagaggtcaccaactccacagatgaaacagttcaataatgaggaaacaggtgagccctgaaaacacaaaaggacagttctgtgttgaaacaccccatcccctcacgttctcaccccaggcccagaagtaggttgcaactgcctttggaagattttgccccttagccatccccacccacttgtaccagctaagaatgctggagactctgccaccatgctctgcgtgcccctgaacctctgtgcagcccggaaggctgatgtacaggtgtacctcaatccacattacagccatgctcctaatgtacatggacatttttgtaactcagctcatattctgactgtatttgagaagctggctgtttaagggaacccagaagtgaattcttttgtaaagtaaagcacccttttgtaatgcaattaattatcccttaatgtatctgttttgtaagtctgcatttttgtatatcggatttaccttaagcttctctagtgaggcattctgagcagtggtgatcacatgccagatcgccctgcctatccacaaagtagatgaccaatgcacgctcctcaaacatctttggaggaactacctggccaaaacactggccaggatgcagcaagcagcagcaggggctgacagcaggcttactgccatcaacattgcttgaaatgcctctatgttctgaataaagaaaaaccataattgcttgtggtgaaacgaagcagtcttcatgttaagtagcaatggttatttttattggtagtaactgaacagtgttttgcaatttgtgaaacagtgtattgtgttttgtaaaatgatgtcatgaaatggtgggtccttggaaacctcctttccgttcagctctgcctctgttctttcaactcctttgaggctcaaaaaaaacacaaagatcagaagccttcagatagagggtggtattctggtaaagaagaaagagataagggacgctaccttgcttttctggcacaggaagcacatgataaagcatgctcagatgagctggaacagatatagctacctggttcgtgtaaataagaataatcaaggccccagagtgtgtatgcttccaggtggaggagaaaggggaatctcccaaaatttaaaaacaaattggaagaataaccaggacagccaagtgaagcagccacagggacccaagcagtcgaggtctttaatgtgcctggagatgactctctgctattcatgaatcttgctattgcacaaaccctatcaagagctgctgcttcccttccagccagaaaagtggtaagcggagcaagtgccaagcagaacagaccttatcatctgggtaacagacttctcagtgttggtgctgtgtctgttagagccttagagcaagttaagcacttccttggtgtgggtaaagaataaaggggaaagaaactactttagagcctctttttctcccaactcatatttttgataggaaaaacagaaaacccatccagttcttcagaaattgctttctaggcattaatactactttactatctatactgtttagttattcctttctttacccacctaaactatccatctaatccaggattccctcactctttttttttagttactaatcattttatgaaaataatgtatttataagtattttcttaaggtttgtgaagagtatttgcattgtgtcttcattttaatgtgtttgcaatcgctccgctccaggaagaacggaaatgctgtcttgtgagcatgaagtgaacgggctgttttgctccagccacttttcttgtacaaccacatggatggattagatgtcctcaggtcttttccatcttcagtttctatgactgtggaataaatgttcagatagaaacttc

SEQ ID NO: 16586 - DNA, 2792 bp, Homo sapiens
gcctttttcttacaagcaccacccaacaacttctgctttcttccctatctctttcaagatttgctcaagacgtccaactgtctctctgacttatctggaagtatttctttttgtgaagccatatgtcctaacaggagcttcatcaccaactcagtgctattaattctccttctctgaatgactcagggtaccctatagggggaagagcaagtcaaatgagcatagtggggaaagaaaaggaaatggcttttataaacatcttttactttgttttgattcaaagaccaaactagaactttaaaagttcaaaaataagaaagtatacatttttgctgttatttctcatcattttgtatatgggaggaaatttataatttgcatgggtgttaggtgaactgttttcatttgcttgtgttcagatatcttgccagattgttaacttcctattgtagcaacagggacaaatatatttgtctttgctgggcatctcgtaatcacttttcttaggggacagaatcccatcttttccttcggcagattgcagccccattccccacaatgcatccagaaatcgctgtgcatgtttgaggggtaggagttcatttggcctcctcctgacttgttgctccagctcctgaacagaaactagcttcagggctcttataggaaatgctaagcctggactaagtgcccagctcagccatcatcctcattagcagtgggtttccagggttggcagcccacaccagcattaatttcaatgaaggggacctccagctaaatagggcaagcaaagtgttctcccagaaagtgctctcacctccgacactggtccctacccccaggtggagacaatgagacatttagttagttgtcctacggaggagaggcagtagagtcaggctgcagtggaatctccctaggatgccaaagtggcattatgtctgttgctcacagatgcagagactgacaattgtgtctccacagcagaggtggatgctagctacaccagctatgctgattttgaaaatcagatctgaggcctagaagagaaactgagagctctctcattccaggaagccttttccctagtggaacattcagtgcagaagtcctcacacactaacagatctccaccattgggtgagccggagcctgtggttccaggggagatccagaatgcatgtgtctcttcccacgcatttatgtcatgttggtagctttagatcagccatggtgagaaaagaacaaaagcttttagttgtttttgttttgttttggagaatttgtttaccagtaaatacatcactgcctgtaccccaaatgttaccagctccctgaggtgtcccacatactattgtgagttctcagagcatgaactgtcctcagaagagcagggctaggacttgtcccagcatctgtgcctccataccaatcctctttctcacagagaaccacttcccatataagatgcttaaggctctcaaaacagcagaacaatgaaacatactctccctacacttgcttagccaagagataccactcaggtaacttttttcaggacatggaagatctgtttcaaggagatttactgctattttatttggaagaagctggcaactggtcttgaccaaaatagaaaaaaaaaaaaaaagtccacaaatttaatcacttgtagggaacccatctatcaaggtaccctaccatatacttttgtatttaatagattacttagaaaccacaaaaataggaatccttaccccttcaattcctgttcaaccctaaaaactgtgataaacgctcccaaccctgtggtgatcagggttatgtaatgttcaaagattcagacacacctgggtttggattcagttgcaactgggttgttatcacactcacttctttttagctgtgtgagcatgaataatttacttagcctctctgtgtctttccacctaattaaagaggatccaccccagggttattttgaggattcaaaaaggcatgcaacacacctggagcacaattccactttcattcaactaattcccttcccttcccccttcttccccttctacaagatcaatatgtaaaggagacatgaggcttactggttgcttttgaacacttacttagttcttagctacacccactctaaaattaactggacattagtgtacagcccatgtccaagcccagagagaaaacaatgggaacaatttcaaggtcctcaccactccttcatttgcagaggggacaacagactttctgacctgagaactggagaatttttaaaacaaaatctctcattccagcccaacctatttaactttttgtggaggaattttacatggaggaagtgagcacatgtcatgctagccaagaggacattattgtcattaaagagaggcattatttatacaccctgcaatgtgcacattaaaatatggaaattttaaaattatgaccaagggcttgaaacatattggattacatgctcacatttaacaaagagaggaaatgtgtttcagtttctggagtggctggaatttacaagctaattgttcaataaatctactcaagatagttacctaaggctttgtggcaatgaccttgaactgagagcctgtatctggatttagcacttgaaagatctaactggatatttgggttaaaagaatcacatttattcccaaatcggaatgctttgtttttcctgtcagttaattgccagttgccaacaaatctagttctatacagtttcttgggatgatgataataaacatttattgagc

SEQ ID NO: 16587 - DNA, 3310 bp, Homo sapiens
agaatcctgttcatacggggtggctgaaagtaaagaggaactagactttcctttgcaccatgtgaagtgttgtggagaaaagagccagaagttgatgtgggaagaagtaaactggatactgtactgatactattcaatgcaatgcaattcaatgcaatgaaaacaaaattccattacaggggcagtgcctttgtagcctatgtcttgtatggctctcaagtgaaagacttgaatttagttttttacctatacctatgtgaaactctattatggaacccaatggacatatgggtttgaactcacacttttttttttttttttgttcctgtgtattctcattggggttgcaacaataattcatcaagtaatcatggccagcgattattgatcaaaatcaaaaggtaatgcacatcctcattcactaagccatgccatgcccaggagactggtttcccggtgacacatccattgctggcaatgagtgtgccagagttattagtgccaagtttttcagaaagtttgaagcaccatggtgtgtcatgctcacttttgtgaaagctgctctgctcagagtctatcaacattgaatatcagttgacagaatggtgccatgcgtggctaacatcctgctttgattccctctgataagctgttctggtggcagtaacatgcaacaaaaatgtgggtgtctccaggcacgggaaacttggttccattgttatattgtcctatgcttcgagccatgggtctacagggtcatccttatgagactcttaaatatacttagatcctggtaagaggcaaagaatcaacagccaaactgctggggctgcaagctgctgaagccagggcatgggattaaagagattgtgcgttcaaacctagggaagcctgtgcccatttgtcctgactgtctgctaacatggtacactgcatctcaagatgtttatctgacacaagtgtattatttctggctttttgaattaatctagaaaatgaaaagatggagttgtattttgacaaaaatgtttgtactttttaatgttatttggaattttaagttctatcagtgacttctgaatccttagaatggcctctttgtagaaccctgtggtatagaggagtatggccactgccccactatttttattttcttatgtaagtttgcatatcagtcatgactagtgcctagaaagcaatgtgatggtcaggatctcatgacattatatttgagtttctttcagatcatttaggatactcttaatctcacttcatcaatcaaatattttttgagtgtatgctgtagctgaaagagtatgtacgtacgtataagactagagagatattaagtctcagtacacttcctgtgccatgttattcagctcactggtttacaaatataggttgtcttgtggttgtaggagcccactgtaacaatactgggcagcctttttttttttttttttaattgcaacaatgcaaaagccaagaaagtataagggtcacaagtctaaacaatgaattcttcaacagggaaaacagctagcttgaaaacttgctgaaaaacacaacttgtgtttatggcatttagtaccttcaaataattggctttgcagatattggataccccattaaatctgacagtctcaaatttttcatctcttcaatcactagtcaagaaaaatataaaaacaacaaatacttccatatggagcatttttcagagttttctaacccagtcttatttttctagtcagtaaacatttgtaaaaatactgtttcactaatacttactgttaactgtcttgagagaaaagaaaaatatgagagaactattgtttggggaagttcaagtgatctttcaatatcattactaacttcttccactttttccagaatttgaatattaacgctaaaggtgtaagacttcagatttcaaattaatctttctatattttttaaatttacagaatattatataacccactgctgaaaaagaaaaaaatgattgttttagaagttaaagtcaatattgattttaaatataagtaatgaaggcatatttccaataactagtgatatggcatcgttgcattttacagtatcttcaaaaatacagaatttatagaataatttctcctcatttaatatttttcaaaatcaaagttatggtttcctcattttactaaaatcgtattctaattcttcattatagtaaatctatgagcaactccttacttcggttcctctgatttcaaggccatattttaaaaaatcaaaaggcactgtgaactattttgaagaaaacacaacattttaatacagattgaaaggacctcttctgaagctagaaacaatctatagttatacatcttcattaatactgtgttaccttttaaaatagtaattttttacattttcctgtgtaaacctaattgtggtagaaatttttaccaactctatactcaatcaagcaaaatttctgtatattccctgtggaatgtacctatgtgagtttcagaaattctcaaaatacgtgttcaaaaatttctgcttttgcatctttgggacacctcagaaaacttattaacaactgtgaatatgagaaatacagaagaaaataataagccctctatacataaatgcccagcacaattcattgttaaaaaacaaccaaacctcacactactgtatttcattatctgtactgaaagcaaatgctttgtgactattaaatgttgcacatcattcattcactgtatagtaatcattgactaaagccatttgtctgtgttttcttcttgtggttgtatatatcaggtaaaatattttccaaagagccatgtgtcatgtaatactgaaccactttgatattgagacattaatttgtacccttgttattatctactagtaataatgtaatactgtagaaatattgctctaattcttttcaaaattgttgcatcccccttagaatgtttctatttccataaggatttaggtatgctattatcccttcttataccctaagatgaagctgtttttgtgctctttgttcatcattggccctcattccaagcactttacgctgtctgtaatgggatctatttttgcactggaatatctgagaattgcaaaactagacaaaagtttcacaacagatttctaagttaaatcattttcattaaaaggaaaaaagaaaaaaaattttgtatgtcaataactttatatgaagtattaaaatgcatatttctatgttgtaatataatgagtcacaaaataaagctgtgacagttctgttggtctacag

SEQ ID NO: 16588 - DNA, 897 bp, Homo sapiens
atcccagacagtggatatgacccacactgccagaagagaattcagtattttttacttttcacactgtcttcccgatgagggaaggagcccagccagaaagcactacaatcatggtcaagttcccaactgagtcatcttgtgagtggataatcaggaaaaatgaggaatccaaaagacaaaaatcaaagaacagatggggtctgtgactggatcttctatcattccaattctaaatccgacttgaatattcctggacttacaaaatgccaagggggtgactggaagttgtggatatcagggtataaattatatccgtgagttgggggagggaagaccagaattcccttgaattgtgtattgatgcaatataagcataaaagatcaccttgtattctctttaccttctaaaagccattattatgatgttagaagaagaggaagaaattcaggtacagaaaacatgtttaaatagcctaaatgatggtgcttggtgagtcttggttctaaaggtaccaaacaaggaagccaaagttttcaaactgctgcatactttgacaaggaaaatctatatttgtcttccgatcaacatttatgacctaagtcaggtaatatacctggtttacttctttagcatttttatgcagacagtctgttatgcactgtggtttcagatgtgcaataatttgtacaatggtttattcccaagtatgccttaagcagaacaaatgtgtttttctatatagttccttgccttaataaatatgtaatataaatttaagcaaacgtctattttgtatatttgtaaactacaaagtaaaatgaacattttgtggagtttgtattttgcatactcaaggtgagaattaagttttaaataaacctataatattttatctg

SEQ ID NO: 16589 - DNA, 92 bp, Homo sapiens
gcctcggcatttccacagacaaggcctccagcacagatggccacaggcctctctatacacatttacagaatttcacataaaggtttactctg

SEQ ID NO: 16590 - DNA, 1594 bp, Homo sapiens
gtgactgcagttaggagggatccgacagagaagaccatttccactcattcctgttgtcctaccaccccttgctctttgagggctggctattgagaactggaaagagtaaaatgataacttaccttagcattgccaagaacttcagcagacaacaagcaattctatttattttatgttgtgtatacatcttgatcattagcaagacattaagctttaaccattatggcaccattttgtgagaatgattgttctttcacttgggctgtttgagagcataattatggtaatcatgagattaatgtttcatgatttctacctccaaagtgtgaagacaagtaaaacaatgtttctaaattgtcttattttgttggcggagaagattacaatggctattagtgctacatttggtcaaatgtaatcacttaaatagcttcttgtcaccttaaactaaagcagaataaaaagtatcctttgaaattataagccctcctttgctgacagctattattttgtaacatcttaccaggtcatgtgctttcagttataactgggctgagcctcctataattacaatgtctatagggactgttttactgcctgtgtattttctgctagagagttagcaatgttagagctagaacagattagaatttctaaacagtatcatgcacagttggtgtgagtgatcagtgtgcattgtatggcatgcatggttgtgaattattctctgttctccaaatactgtttctttaactcagatatttttgttagtgtctaggccacttcatttatttttcgtcatggtactttactgacttctctttattcaattctccacgccctcaccaaaaaaaactgtctcaaaatgagaatattttattttcatggtgagtctagaaaacgcccacttcattctgattaaaaattcttccatgttttaaatatcagaaccagacctttcttactgtgtatcttagcccatttgtgtctctataacaacaaccagctttcaaaggaactaatagagtgaaaactcactcattaccacgaggatggcacaagcgattcacgtaggatctgcccctgtgaccaaaacacctcccattgggccccacttccaacactggtgatcacatttcaacatgaggtttagggaaacaaatgcctaaactacagcactgtacataaactaacaggaaatgctgcttttgatcctcaaagaagtgatatagccaaaattgtaatttaagaagcctttcccagtatagcaagatgttaactatagaatcaatctaggagtattcactgtaaaattcaacttttctgtatgtttgaacattttcacaatctcataggagtttttaaaaagaagagaaagaagatatactttgctttggagaaatctactttttgacttacatgggtttgctgtaattaagtgcccaatattgaaaggctgcaagtactttgtaatcactctttggcatgggtaaataagcatggtaacttatattgaaatatagtgctcttgctttggataactgtaaagggacccatgctgatagactggaaatagaagtaaatgtgtttattg

SEQ ID NO: 16591 - DNA, 198 bp, Homo sapiens
gaagcttttggggtcagatctctggaacatcatgtgatgaagctgacatttttaaaaatcaaatgatcctttatcttttcagaaattcatcaattttataaagaaaacaatattgaaattttgctctattttctgatcatgaaactgattgtaaagctttttgacaactaataaatgtcttggtaattgctagattct

SEQ ID NO: 16592 - DNA, 5325 bp, Homo sapiens
tgtggtttcctctgcagtgatttttctaggaagttcaaatttgacagcgagttcagctcagctgtggccctctgcccttccagctgtgcctagcaagcaaaacccaggaaagaagcagaagcctcctggccttacatacagaatgcctggacaagagagaacttgctgcgggctgctttgtattttaaaacacagcttgagagttcagagttggtggtttgctcacttaactgttgttaagatggcttgaaaagtttcattttatacactggtaccctggcttgaaatttttccactttggttatctatgttactatattatatatttataaagttattttaagaactctaaactacctgctgttaaaagaatagatggtgtaattttttcctggtttaagaaatgtattgttaaacttttctaagacagtcacttttcaaggaagagggctttcacttttgagtgtgtagttgagtgagcaggaaaaatgaatcttctacccttctcccacaatgtattatacgctctttaagaaataataaatcataagtataagggtggggtggcttatttgatgttcagttttatattataaccctgggagatacaaagactgaagctcttcctcctcttccttttctcttcacgcttctttacactattgccaaattataaaacttggctgaccacgttgaagtgaaatacttattaagctgctatgaatggtaacagtatgataaaattcatgctgttattaggttttctccttccaggtggttgaagtgaaaaatctcaggtgtagcaatactctgatttgttaaatgtatccgtttcattatttggaactctgccaataagttagttttcagcagaattttgtatttatgtagtattttcccatctcttagcacagtgccttgcacatgactctaaatgaatgcttgttgaattgaattgcaactttaaaaatatctcagatatcacaataaccagcatagtgctttacattttacaaagtccttttgcacatactatttcacaagtacatcacatcagctttcatatagctttatattattttacatcagttttacactgatggagaagctaaggttcagaaaagtgaccaactcaaagtcgtaaagtgtagtaggatttggcctcagatctttgactccgttgtgtgcagattctgctgtattagtgttccttctaaatattgtatgcagttttcccagtgttacgagattggtgttgctatccatttgttgtgaatgaagacttgtcctatagtacatgacagggctgagagtggactgtagttcttagctgaaccctttctactgtttaaaacaatcatcaggcctatcctctgctcccaggggaatgtgggagagaaaagggttcttggccaggctgtaggtggtggctcacatctgtaatcccagcactttggaaggctgaggtgggtggattgcttgagcccagggatttgagatcagcctaggcaacatggcaaaaccccatctctacaaaaaaaaaaaaaaaaaaaaaaaaattagctgggcacggtggtgtggctatagtctgagctactcaggaggctgatgtatgaggatcacctgagtccaggaggtcgaggctgcagtgagccaagatggcgccactgcactccagcctgggtgagagagtgagacactgtcccaaggaaaaaaaaaagtgttggggggtagttcttaagcgttgaagatttcctttttggaaagtatttaaaggtagaaatattaataatttttcctaaaacatctccctaagaagtcactgataattataattagtttaaatttattcttacactacttaagaaaaatttcatttagaaaaggctaccatgagatcttttgactatatggagtagactgcatacagatctctttatttctattatgaatattttagcgattataatcagctattccactgagtattagatttggtcactaagtaactcatgtttttctttagtcaatcattcattcattcactaaaacatttgttgagagttggctaaactctagattctgtgccaggcactgtacagggtgatggagatcactcataagaaggcctcttgctcttagccagatcatatgtaatactaaatttaaattttttgcattaaaaggctaaaaaatcatttgtttttgttaattatatactggttgatttatagatgtaattagcacatattcataagagacaaatatatacaatgagttactatacatatacaaagtgattttagctgtataaagtgatattgcaaaaaactacagctaatgtttcttgctgggtaattattagcataaatatcaggttcttagaggtctttaagagaatactttagagctaccaaaattagcagcagtgatgtaatatcaccctgaaataccaggagcagaggtgccccagagtgcttcacagctatgatcaggaaacttgacctgccccattgctacagcaacggcataaggactaggaaggtccactagctggggaggtcttggaaccctccgagccagaaagaagcattccagcatgattcctcagatgcaatgaggaaggtttacagaattttcacagggcaacagagatcaagtggtatgaaaaggtaggagttttaagctcaagtctcaaagataacctacctttacattctcagtcagaatttgacccagaaagaggaagtttcttcaggaacagaccgtacgttgatgaagtagaagtcatttcagtaaaaacggagtacagaacttggtcataatatcttgcattttatagatttattaaagattagtttcaagttcacattcgctattcagttgtaaaccgaatggatgggaggggagaaaatacaagctctccacacaggtatgctcctctcttttctgagagagaaggcatgggattttcagcataaattccatgttatgtgagtgctgtttgagttctgaagttcctatcaatatctgttcctgcaagtgatctctgtaagaccaccttacatgctggtcttagttattgttaaaattgcaaggtttcttcacaccctctttgataagaagtgtttagctggcagagctttcccttgacttctgagtctagtgtgggttggcccatgacagtgggaagaaatccaacatgttacatggagaccttgtatgtaaacaaactctgtagcctttgaaagtggaactgctttttacagttaaagggctgctaaatggcttgcagatgagatcttctggctcaccttgatcttcacatgaacccattgtgacctatctggatttcctaggacctgtagtttccatttgggttatattagtgcctcaggaatgtgtcactactggtcaagcaatactcagaaattcaggctgtgaggggttagattagaggaaagtaatttaggtgagctatccagagctttcaacctcagggtttataggaaaaaaaaacaaaatacaaaaacccttaggacttctcatactctagccctgaccttgcagtctcctctgaggggcctcctaagacccttaaaataatattacaataggactttgagtgtgcatttcacagtggaaatagcctctggctagcattacttccaaatgctagttccagctaaaaacaagtactttttattagtttcttgtctttcaacattctgccatcaaaatatattcattttattaacttaccgattattgggaacctgcaaaaaaaaaaaaaaaaaaaaacacacatgctgtctgcagccactgtttggttatttttgatagtttaagagaattataaatcaagttgttctgtctactagagtcagaaattctgtgctagaatgggacttctaaaattaggtggtcctgtcactttctagagaaagacccaaattcataggtttaagtggcttgtctgacatacacatacagccagttagtaacagaattcagaatagaatagagttcttttttttctgtcagtccgttgttctacttctctttccttttcttcatggttgagcagcttttggcaaaatgtgttccatatagcagtagttccaagagatgttaatagatgtaagaaaaaaagtgtgtgtgtgttgggggtgggggattgcatggtcaattaaaatgaaggaatgctgagtttgtttccttactgtaggacttctaagagttttgaacatgctattacacattgtgaatttataaaaggggacaaacactgtttgaccttagactgcactccccttctttattcctcagagcatctcaaaggactacagggtcctttgagaaacatggcccttgatcaagtttacaactctttgagaagacatccctaatggaaatactgaatggcagatctattactgtggtaccatgtagtgtgtaataaatcttgaagtccagaaagcaagtatatttgctgtttagagctatacttaaggtatagagattcttttccacctgtggtgtgtaaaatcagtattgtgtttaattttgcaggtttttcaaggatcaactaatgtgcaaatacagtggtgatatattgatattacattttaataatgcttttgtatggcactttatagttttcagacaccttttgtaacagccctgtgagacagacaatattatccttattgtacagatgggggggctctggaggctctgaaaagtttttggtgatattcccctaagtttataccacaaaatgatggagccagaatttagttgcagaacttctgactccaagtccagagttctttactagacatctggtttcttactagctttttgctagctttttattttacagtgaaaagtatggaagcaaatcctgataattttggcttattatcaaatatcatttattttttattgcagagacccagcagatgtaactctcattgtagccatcccaaagaaaacccttctttgccctttgcagtgccacttatttaggtaactgaagtgtatttccagtacaatttgattttgaactaagatttgatatagagttgtaattgcttacataactctttgaaaatgtatcatccctgggttctcaggtgaaggaggcaattcaaaagtaaaaaagaatattcgaatacaataaataccctctgttctcacacaaatgctgtttcttagctaacttgctttgacaacctactgatgtaacttctttattaatgtgaaatatttatattttgaaataaaattactagtgttgaatgaatcatgtggtaaacttaa

SEQ ID NO: 16593 - DNA, 154 bp, Homo sapiens
ccacagctgcagggccaacagattacatggattgggaagtctttagtataaatatattttttaaagaatatccagtataattttagcttcaattatttaagaaaaaaaacctcatataatttcagctttttggaagaaagaacaagcttctttt

SEQ ID NO: 16594 - DNA, 2579 bp, Homo sapiens
aattctccccttgtcacctggaagatggcatggtgccttctgtccgtcttctttcttcgggctttgtgtgctcactctagcacagcatacaagtgtgtgctctgttcgcccaggtctccatggttagttgaagccaatttctggcttgacttttatgggaaaagttattttatgtctcctaagcattagagtttttctattactctatgtagttgagacaggatttgataagtctaggaaaagaaagatgggaaaacgggattccttttcagaagtacctgtgtgtatctgttaataaccacaggggttaatatgatgtaggatcttttactatcaatttcaaccatttgattttgtatgattgaaacttgcaccgagctttgactgtttgttaaagagtcatttttaatgaaagaataattctttattgctggtttttcatttacactgataaatacacagatcttataaagtctttaacattcatttgtattcagatgtgagtagaagaactaaaaaaagaaagttacatatcactatgactgaaggtacttcagcttaatctgaaatataatttaacttgtgaactccttggatatgatattatttggaataaacagaatttatcattgaacccaaagtaggaaatgatagcttacattgtctaaaaatccttacaaggttaagatgattcaatatcaagaagattcagaaaattatttctaaagttgatcgattcatgtcgtattgatagaatcttgaccagaagaaattttgctctttttatatagtttcaagaaatgtgtttttaaatttttattaatgcacttgaacaactttgcaggaataaagcaaccccctaaccacaaaatatccctctaaattagttccctagctttctcaatgaatacacacatatttttacatagctatgatcgttgtgtacattctcctttgttttacttctcggcctaacacttgtctcctcttgtcaacacagattctactctcaccaatttaaatgtctttatatccatgtaacatgggtaacctcacttcaccccattattagatatttgagttatatctaatttttcactcttataaatagtgctgctatgaatgtctgtaaaaaaaaaaaactgctccttcttttggattattcccttaggaatatctccaaagagggattacaaggtcaaagagcatgaagtattttatagctcttgttttatattgccagattgctttctagaaagatccaatctttgggttggaaggaccttaaaggtcatctagtttagcctccccaccccctctgaatgcttgaatcccctcgacaatttatgatgccaccagcaatgtataagcatttctgtttaccaatagctctgccagtattgggttttgccatttttatttatttttgctagtttaataggtatgtatagttgttcttgaagagttgttttatttcattaattgctagcaaggctgagcacttttccatgtgatgatttactagttgtatttccttgtgtgtaaaatgttcattcatttcttatgaccacttgttaagaggaactgatctcatatatttgtatcagaactgtatttttatgttatattgtatagtttgctctcctgcccctctccttaaaactgaatggtgccaataatttgatactaatgactacaaaaaaaggtaatgcctcatttactagtattgttgtaaaatgaggaatgtatgtgaatattcagataaccgaggattaaccctttaagtgctgaatctttaaaattttaatatatttttttttgagggaaatctttctaaaatgtattacgcacttccctgccttagtaaacagagtatactggagagtatttaaccttttcttgatgagtcatggtcatgattataaacatcagccccttttataccttggtacggtgcagtgatatcattaagagctatcaatatgtgtagggcttggcttggccttttataggatattatgctgttctcactgatggttttttactgctctctgctctgtcagtggagctatccggggcaattgtagcgtttgggtccttttacccctatgtcccccggctatacttttaaaacagctttagctgttctttatcttgtgcacatgatacaaaatatgttcccgtacaatatggggctgtcacttcttgccaacccagcaccctcttcctcttctaacctgctttctgaggcttctgctcttcacctcctgctcgctgatggaaacctccagggcaaagctgaaggtttcttggggaagccaggaaagccagtatttcctatgtgtcagatctgcttggcttccaagaagggatgcatgggctttttggccagtgtttccaggaggctctgggcttcctgcttcttccccgcttcccccagagttcacagatgttgaagtttctgaaggttgacgtcactggaagtctgaccacaaacaagttggctgttactgtatttgaaacccagtacctttggcagctcacctctaaccagtaaaataagaggattccatggtttc

SEQ ID NO: 16595 - DNA, 1931 bp, Homo sapiens
gagactgaagcatctctcttccattcaccttcatagtttcattgcattccatgaaaagtgtcttggcctcagatggatggatgtgtttggacgagtgtctttaaggagtagtcctgaaaggtgtttttggtgtccatgtaaatatttgaagataaaaccactatagcttgtcataatttactgttgactgcattctcattaaaatgaaggtaaaggctcaggaatcatattgatgttctgattttaaaattggagtcaaagtctatgtttatcattttactatgttcctgatgttctttgttatttaattaatgggagcaaataaaaccagaagagcttgggaagattgctcagcatatattcctgtcgtagaagttgagattgctagggtccagtttccctagtgtggcctggacgagtcatttccccttcattgacctcattttccccatctgaaaagagagggttggactaagtgatctccaaggtcctttccaactctaaaattctgcaatttgttaacatttcattttgtttaggttgaggacatacattcaaactaattttatcacaaggaaaactgcaatacccacttccttgacagagttactcctttcagaagctaaataaagtatataacttattagatgttatatagatacagggggactttgaatttcacatcttaaagcagttgagctactttgaatttaagcagtcgtactaatcttaaattgcatagcatttgttttgatcgaatttgctgctcaagtatgggaataatttttaatgtcttaatgattggtgctgctaacttgcgtgatttcagaagacataattgtgaatacacactgtcagaattgggggattggtttttaccctagacttcactcttaaaaagcaacgtgcaatcaagatcatttatggctcaaatgaaagcatataaggttttcttgaagttgtgccaaagcattctgtagagtaggatgagatggttgttgccctagtctgttggtagaaccagaaatcaatatgttgtcttttaggttaaagcttgtaccaaaatatttatttcccccatttcaagccctgagtcaaacatttttttctcttaataatagacctgaaatgttttattagtatttctgtgaaatcagttgattcttgtgccatttttgtatatgtaattgtaattttgcccatgttaggccctctaaaaaatgtttgacatcctttgagatattttattactaaaatctgatcttttttggctactgcaaaaatctattcagcaagaaggtatcagctgcataccttgcacagtggagctgactacctataaactctccctaaggcatttgtttacaggtgtattccattttagcagacgttctgatgctcagtgtatgtgctgcatacaaataaatgtgttctgaatcttttcatcttattgatagcatttttacaaatgtgtttccaaggaataaagattattcttgctttttttttgactccatcttcattttttttaaattgattcttgttgctatgcagaagtctcatttgtgaatgaccttggtaacagaacagttggcttttggaagtctgaaggtgagcattcagttaggtgggtggagcaagatcatcctagaatgaggctgctcttggcaagagtggatcttataggcacagcagctgatgcctttcttcatctggggcaactctggtgaaggttgtcctgcctgtcacaggtgctgagtagagagaagtggtggcagtgggatttcctcagtaatagtcctgtaaaggtacgtgtttgtcctggctacttgtgctcttcctggcaggaaggcatccaaacccttatctgtgggctcctggaaattgtgtatgccatataataccctctaataaatacctctctgcttaaa

SEQ ID NO: 16596 - DNA, 1318 bp, Homo sapiens
gacaactgtgaaaaagttcattcctctttcccaagggcatcctccttgaaagaggaggacagacctctctggaagcagcaagaggaaccagtagctgtgggaaaggaatgggcacctctgaacccaggcactttaaacttctatagaaaagatatcgtgtacataggaactggtgtagataagcatgcaattatggcatcatttaggcctgtatttctatggaaagatacaaaaaggatctcagtttggggcctgtcctaatgccttcttccctaacatcaccacacacacccctgtcggcatcctggagcaattgagaccggacacccacagagctgttgtcctcccagcaacaagatggtgtggttatcttgggtcatttggatgttttgtttgtttctgtgtgtcagactgtaagggctgagctttctgtgcttctaggtggagctggaacaattcagattcacccgccctgatgctaaggaaaccctgacgtatgtactagatggcagggcactgggggtcaggctgaaggctgagcaacacctctctgccctccctccctttgtcccatctcccagcgacttccaatattcatgtttctgagaattgtgtccctcttcaggttccctcttggtgcctaacctggattagtaatgtgcattcaggtgaattttcagctgaggctctgagaactggtactctcagtgtgttctggtcatcttgtggcttagttgtagaagcaggtgtgtctcttgcctctgcttgcctcctactgcacactcagcacccaggactggaatcaccgactactgaatctcctacatgtattgctgctacttcaagctcctccacttgaaaccttatgattttcccaaggggagatgggacagtgtcatctaaatattccgaatgtttggccttctgagaaaagagcttctagtaattgaaccatgggaaacccagcttctggagggttggccgtggggctgtgtacatgtgtgtgcccaggggtgagtgtttctcaggattcctaacgattcaaattaccgttgagtatatataaagaatgagtctctgtatggaagaacaaatgtgtgcattcacccccagtcacaatggtctccattgcatttcaaaggagaggatcagactatctgaatataaacacaatctgatgttaatttattctaagaacaccatcattttgattgtcctaaagaattctgcctttgtgaataccgtgttaaatttttttaaatttgtgacaggattgtagcaaattattatttaaggaaaataaattgtgtaaacattt

SEQ ID NO: 16597 - DNA, 127 bp, Homo sapiens
tcatgttttctgaaaatataaccagccattggctatttaaaacttgtaatttttttaatttacaaaaatataaaatatgaagacataaacccagttgccatctgcgtgacaataaaacattaatgct

SEQ ID NO: 16598 - DNA, 1380 bp, Homo sapiens
agctttctattctgccagatgtcttgaccttgaggccacctatggccttatagaagaaccaaggaggcagagccacaacgaggtctctagctatgagcaagaactggactaacctaattataggaattgtgggagacgaacttcacaatggtaacatggttttacccttccaataagaagagacttcccaggccaaattgcccacagtttaggatgaagaggactgtctggtcagtgcagccccattctgacattactatgaggtcctggatatccattccttggggaggaccagtaagacatctgctccatccctggaactggataattttggaacataaaccagggacctagccaacagaatgccttagcaatgcccaggggtcaatgggcgtggcattcttgttttcaatgtcttctgatgatttctcatatattctggagaagacaagctctgagaattcagatgctttttctggtggctatgtctggggggccatctcacttagaagtcacaacactcattggcagtgatcacatcatttcaatttgggcttcccaaagtatggtcacccagggtatgaaggtgagatcaatgctacctaccattttgtgtctttaaggggtctttagaaagggctaatcatctgtcactgctcactgagacatgtacattccagcatcatcacagagttatctccttccttccttccttccttccttccttccttccttctgtctctccctccctccctcccttcctcccttctttccttctttctttcctctcttccttcttgccttctttcctgccttcctgcctatcttttctctctctctctctctgcaaattaagttcttattaaaaactgccaatcattgacgatatataatgatgagatcctgaacaaaagaggcaaagaaatgctcctacttgaaaaatacacattccctatagactgcctcctgtttagtccaacttagatcactcagatccttcctgggatcaaatatatttttaaacctaagacaaagcgaagcaggtgtcacttgggtgatagggaaaaaagcttgtatttcctggttaatgtttagcttttgtaatgctatttaaacacacctaaggtgcctttccctcatctcaggtgctttctctgtaaagtttcactcccacctttcttttctctgcatggccgtccagtcttgcccatctacatccagagctgttaactagtagtgtcattacctgtgaaaaacatgtagaagcttccttgaaccacccagaaatccactcaaatttggggattgtcattccttttgtgaataattaatacaattcagttgttttttaaatattctaataaaaaaggaaattttctc

SEQ ID NO: 16599 - DNA, 93 bp, Homo sapiens
gatttaacttttcaatcaggaataaaattccttaaagcctcaacattttcgcagcacttgaatcaataaatgtttcacctttgtgcatttgtg

SEQ ID NO: 16600 - DNA, 1645 bp, Homo sapiens
aacggaaactgagatgaggaaccagccgtcctctcttggaggataaacagcctccccctacccaattgccagggcaaggtggggtgtgagagaggagaaaagtcaactcatgtacttaaacactaaccaatgacagtatttgttcctggaccccacaagacttgatatatattgaaaattagcttatgtgacaaccctcatcttgatccccatcccttctgaaagtaggaagttggagctcttgcaatggaattcaagaacagactctggagtgtccatttagactacactaactagacttttaaaagattttgtgtggtttggtgcaagtcagaataaattctggctagttgaatccacaacttcatttatatacaggcttcccttttttatttttaaaggatacgtttcacttaataaacacgtttatgcctatcagcatgtttgtgatggatgagactatggactgcttttaaactaccataattccattttttcccttacataggaaaactgtaagttggaattatcttttgtttagaaagcatgcatgtaatgtatgtatgcagtatgccttacttaaaaagattaaaaggatactaatgttaaatcttctaggaaatagaacctagacttcaaagccagtatttgtttaggtcatgaagcaaacaatgctctaatcacaatattaactgtttaattaaaatgttgtaacaagtataaaacagggaatgtaagtttattaccaaagtgatatgtattccaaaaaagtcatagaagatgaagcactataatattgttcccatatatttaaaatacccaagtacattctaattaccagtatatcagaggaaaattttcgtagtctttgtaaaataatatactcatcatagaaaacttgaaaaatgcagaaatgtataaaaaagcaaaaatgattactgataatatcacaacccagaagtaaccacctttaaaaagcaacccccatgtatgcctatatgtgtattgtatactttttttacataattggagtcatactgtaaacagttttataagtagatctttttcattgcaaaattgccacattttcttatggcattaaaaattttacaaaaacataattttaatggctatattatattccatttaatggatgcaactcagtttatttaaccattcccatgttgttaactatttaggttgtttctaattttcattattataaagttgcagaaatttggtgtacataaaactgtctccatataattgattattaggatatattcccatgaaggattctttttttaaaaaaatgtgaaatgtcatcttgtacttacacctttcatgaaaagggatttcctgcttttgtactgcatgggtggcagttgtgaggaaaagccagtcaaatgacctttttacaaaagaaatgcagtggtcacttcagttgagagtgactttttaatacaacaagatcaactagaagaattcaactgtctcaagaatcaaggtaccccaatatatctcgcaattccaaactttgtttgagggactcgttatccagctcttggtagccacacctgcaatgtaaaatggaagaaaatgcaaagaaaccaaatgtgccgagtgaataaaggattgtcatatc

SEQ ID NO: 16601 - DNA, 148 bp, Homo sapiens
aaaagaggacacatggaatctggaggccatttagatgattagttaatttgtttttcaccatttagcaaaaatgtatactaccttaaatgtcttaagaaatagtactcataatgagtttgagctacttaataaaatacatttaagtggt

SEQ ID NO: 16602 - DNA, 149 bp, Homo sapiens
aggaggagaagagcaatgttacatgccatattccactgtttttgatgctaatccactagcgcaattatttagatttgctcatacactaaagaaaacacaattgttcatatatgtctcagtatttctgtattaaatattcataatatgta

SEQ ID NO: 16603 - DNA, 710 bp, Homo sapiens
tggcagatggacactgagtggggaggatgcactgctgctgggcaggtgttctggcagcttctcaggtgcccgcacagaggctccgtgtgacttccgtccagggagcatgtgggcctgcaactttctccattcccagctgggccccattcctggatttaagatggtggctatccctgaggagtcaccataaggagaaaactcaggaattctgagtcttccctgctacaggaccagttctgtgcaatgaacttgagactcctgatgtacactgtgatattgaccgaaggctacatacagatctgtgaatcttggctgggacttcctctgagtgatgcctgagggtcagctcctctagacattgactgcaagagaatctctgcaacctcctatataaaagcatttctgttaattcattcagaatccattctttacaatatgcagtgagatgggcttaagtttgggctagagtttgactttatgaaggaggtcattgaaaaagagaacagtgacgtaggcaaatgtttcaagcactttagaaacagtacttttcctataattagttgatatactaatgagaaaatatactagcctggccatgccaataagtttcctgctgtgtctgttaggcagcattgctttgatgcaatttctattgtcctatatattcaaaagtaatgtctacattccagtaaaaatatcccgtaattaag

SEQ ID NO: 16604 - DNA, 5412 bp, Homo sapiens
cttttctgtgaatttttctcctaaaactggaccataatttcagtaaaaccttcagacatagactgaagcagctcaagaccaattttgcctctttcacaaaaataactctgagtttgatattcaagtatattttaaaaatcaagggattttttttttttgtattccccctgcccccgccagtcaaaggtttcttttccctttttaccatggtttctacaaaaataaccttcaggaaaaagaaaatcaggaaaaaaattttttttcaataatcttattccctatattaaattagatttgaagaggattaacgttgttttagtttgggtccagatcagccttatacaacatttctaaactcatttgtacttttaaaaaatttaaacacagacttctaaaattacttgatgtaagtaatttaaatcacttatgaccaagttattaaccttatgaatcagaagtctgacccttgtaggaaattatattcacatataaagtacatcagatctttgccatatattgatggttattatgcataaacacattgagttgtgttggaagcagatttataaacctgcatgttttctttgaatgatttctttttttcactgtaagacactcctttaaataatgcctatctttaactttttaagactatttggaaaaatgcagtgtctcagctgtccccagggaaattaagtggaattcaactaagatctgttaataagatgtcagaataactaataattttattaggaaaaaatcatgttttaaatttcaaaatgacacttatttgtcaagtaatatgatcttggaaaattttaaagaaaaataatcctacttataaactacttttttataattgttttcagaaaaaaagtttacagtcttaaggaaaatattcaggtctatcatatggtttgacagattttttaaaagttatttttggtaaggtcttcttttagaaaaaaattaatctcaagggttttttgtaccactataatctctaatacttactcagaattactgtgtatttacttaatttcttattatgtgccttattatgtgcttaagatacaataggttagagtttaatctaaatatcttgaaagctatattgtgggcttggtaagcattttgttttttctttctctgttttggtaaggatttaaaatttttttcattgcaattttaagtggttttcaataagtaatagtttttatcaaatttttggtgcttggtgcagagacggtgtggggaagggtgaatggttttgggaataattcagtgcacacctgtaggcctctttacattgtgactgataggggttattgcatatcaatttggggctgtagagtgcaatctcagtttcatctttttcacccatcagaatttgtctcaggattacttggtttttctcagtcctcaagcgagaacttgcttttctttgttaatgtgactttcattactgagtacccacgtatttggagtatgagaaggtgggttatttctcatactctgtccctctctttttcattgaatgtaagagtacattttaatgttgcttcagtgattgtataatgtaaaattgtttctttttaataagaaactttgctattatttcttcaattgttgatcagaattttttaaagcagaatttgtcaaaagggtcatttttttgtctaccccttttacacttttcagattctcaaagtgtctcatctcaacttttaaaagaataaagaatatcttgctgggcatggtggtgtgcgcctgtgcgcctgtagtcccagctacaggctgagcctgtaggcaggaggctacaggcaggaggatcacttgagcccaggagttcaaggctgcagtgcgctatgatcacatttgtgaatagccacttcactccagccctggaacatagtgtgaccccttctcttaaaagtaaaaattaagaaaatctcaatctctttgctgtattccagtgattaatttgaacatagggaggtttttacagaagaaattttaccaaaaaatagagactgcaagagatgatacagattgtttaaaaagcagaattcactcaccactgagcaacacttagttggtagaatagaaaggagggatactaagttaagacttttcaaatggatcagtttggctgaatagatagatatactcatgtatgtagttgtgggagtttttagttttttgtttttttacttatgaaataagttttgacctagacacaaggggtatatgaaggaggaaaaaaatttctttgcaaaatctcccaaaacttgcttttttttcccttccacacaggcactattataattttcagtgccatgttaaattggattatttcatttactttaagttaggaattactgtgtaatttattaattcatgattctcataacattcagcataagtgtagcaaagttgctaataacggaaggggatcatagtggtgttgaatgtaactttgaagtagggaatggccttttaagtctgagagagaacatttgaatccttttcagggatttgtgtaggggtgtgtttgtgtgtgtgtgtgaatgtgtgtgtgtgtagataagtgtatatacataaatacactcttctaaagttgtatatacatatgcacattacatacattttaatttattgacaaaattaaccaaattaagatttggagatgtgggatgttcttgttttaaaatagcatgtttgaaaccatcagtttgtgtctaaaattagctgtagcacatggatgttgtccatattaagctatttgctgtttgaattatagaggtctacagtatttgtgttggcatagtttttgtaaaaaaaagattaaaaaatatcaggatggtggaaaaactagatctgtgtatctctgttttggcatgcatttattcagtatcttctagcaatggtttttctctgttgatctaccgtagtatcctatttttaagtttattttatttttaaggagtattgtcatcacttttcaaggtgtcttgacttctacacaaagtatatatattcaggactttaaaaaatagcagtacacatttaacagtagcgaattacaccaaaatgatttactttgagatttgaataatttgcatagcagtaaaatgtgttttgtgtaacatacaaatagaaaaatgacccagtatcttaattgatacttactggagagtatcagaattacccagcagctcttacagaatgccataaattctttaagactaaatattgaaatcaattatttgaagtaatgtttctgatttactgttaaaagttgctgagctcagtttttggagatatcatttatgcctgcctgttcccttatgacagtgaggccttctttggctccacctagtatgataatcatgggttctgttttagttgatgagaagtggctcctatgaatgcctctgctcaatttctttttattttactttattttatttttaggggtctcgccaactcctgggctcaagtgattctcctgcttccacctccccacagtgctgggattacaggcatgagccaccacgcctggctctctgttcttttcagtgtctccgtgccatcagtcagcagtgcttacatgtttagcatattgtcatgcagtttctcttctgttcccacgagatatttttggacaaaaaattgacaaaagtacatgtgtttttccccacctatcccttagaaaacctaatgtgtactgctatttttaaaaccaaaaagagacagcgtgacgatgcgtaaagcatttttcttagcctttcctttgtcttgatctgttaatgagaacaaaactgccagactcaaaatactctactattgtgctgaaagaaatacaatttagattgcacaaaatttgaaaatataactcagctgtcttttaaaagagttgtgttgttatctacaagactattagcagtcttttttcagagcaaattttaacagctagttgtgagtggtttaaaatatagaaaattattaaaatcttagtttgaggggttttatagtgggagaaaaaacaggaccaaagtttatgtgccttcttcagtagtcttaattgaccttttcttcctatttgagactaaagtagtatcagtattctggttttcaggaaatatgtactatatagttttaaaagaatgttgtcccaccaactattcatccaagcaaagaattgtaactataaataaagtctcagttacacttttgcctttatcacataatattcattgtagagcattgtgcaggtccaagaatagagctgctcaaaatctttgtggtagtttccttagtttttgtaacctgaggcatatgttccagagaacagggatatttgtctggtccagtgaccttggtgatcatagtcataattgaaagatgcctatggcatgcttaaatcagcattgtcaactgatttgttgttgtattattttcacttcttggatctatgtagtagttgtaataacaaatatttaaatagctatttttttgatgccattaaaaaaatcatactctggccttttttcccccttactgttgtttcccagatcttttaaaaattcatcccatatccagaaagtaccagttataaagattgctgaccaagcaaagttttgcatcaaagtgtcacctcattgctctgaccaaagactgactgttgtggttttaactcctctctgtaaagcattttgcattttccccaagctcctttctgaaagaagaaccagtgcagagcggcctttactttcaatttctactgctgaatagactacttagagaaaatgtgagtttcagtgtgaacagaatggattaggatgacgagtttgatgggcattttcagtactgtatctaagaaaaaaaaaatagcacagctaggagcctctgacattgtctggtgttttacgtggtctgttcatcaaaattccccttttcagtttttaagaatgttcgtctaacagaagaaaatgctgtaaatatttgtaacaacattttttttaacaaggccaaaaaagaaaaaaaggtttttgggaacaaatgaacttataaagtggttttatataaaacatcaattgtcttgtatattttggataagcagcagtaccagctttcatttgtaacagtctgtggcattggaaaaaaaggagtctgtgattgttgaagtgaattatgttataaatgcaaagagaagataaaatattaaaaaacatattttctaaatgcgtagtgcatggttaattcaagcttctgtacactacagtatattccattttcgttcagtttgtatatttgctgactattacttgatatctctaatctcttttcctaacaaatatagcattgtagcatgccttttaataaatgtcatgacatctgtactctctt

SEQ ID NO: 16605 - DNA, 1025 bp, Homo sapiens
agaaaacatttgcgatggaaaagtgactttgtaatatcaaatgccaaagctactatcattcagtgctacatgaactgtgactttaagaattttggtgaactttgatattttttgtttgtctgaaagaaaggaatgtgtaagtgaaagctgaaagaagaataaccaggatgatgagagctgtggaagctgtatcgtccaaggaattgattatgtaccgtgactgtaacttttttgtaatgctgtttaactctcaatcagactgtgaactggatggtcacgaagtcattccccaactcctagcaagtttgactgaatatatcatgtccacagtagattttcaagaatcatttatagtacttaactttaaagaaacaaggctgcttttaaaaaatgaactaataggcttaaatcaattgcatccatatttgctgtttataggattgctatcagtataccttttgcgtttatagtcaacatgtatcatcctgaaatattctttctggacttataactacttccccctttttcactttaaaacaaacctcaagaataaattactaaccagtcttaaccatcttttataaacatatgctcttataaatgttgtgactagatgcaattaaaaataatagggaatgtggtaggtttttaatttgtacatcctcttatttagtgttaccacataaatgatgagtttgtgtggttctgttttccatttttgttctaactgaaaactttttggctgggcacggtgcctcatgcctgtaatcccagcactttgggaggccaaggcgggcagatcacttgagatcaggagtttgagaccagcctggccaacatggtgaaaccctgtctctactaaaagtataaaaaattagccatgtgtggtggcacacgcctgtaatcccagctactcaggaggctgaggcaggagaatcgcttgaacctgggaggcaggggttgcagtgagctgagacggtgtcactgcactccagcctgggtgacagtgagtctttgtctcaaag

SEQ ID NO: 16606 - DNA, 841 bp, Homo sapiens
agatgcttacctgcaggaactgaaaacatcagccatggccaggcccccagaagacaaaagaagggaccagggaactggtgacctaagcaacccactgcttaagaaacctgcgttccagccagagttggcctcagaatgacctgctctggctcagggatccctggtggatggggaaaagcactttcctggtgatggaaaaacgttctcagctttaagacacccccattaggcagacactgggttctgtgacagcagagcatgaccttaagggttacaggcaggctgcacacagcagtcccaggccctgtgaggggcttcagactccagctacagcgagcctgccccttttcttcaagggactgtcttgagggctccaaagtatagctaactagtcacctgggtgctgtgctgaaagtcccatgggagaactcaaagcgtgcattatcacagcctgaggggaatgtggaagggatgttttgtaagaactaccaacagttttgcacgaacaatgtcttttaaattaaaataaaaccttgaaaaaagtcagctttctttcctgagtcttccttacctacaaacactcaggagggggatggagctcaggcccttgtcttctgggtagttttgttactactgttgcttttaagaagcaaatgtcacaaggctttcttcaatgggatgttcaattgagtacttccagtcaacagtgcttcccaaagtgggtggtgtgaaggaagaggaggtacattaagagctattttatttgaggtagtcatttttataaccttgtttacttggatttataaaagcagactcacctaataaaatcaacattcattgt

SEQ ID NO: 16607 - DNA, 831 bp, Homo sapiens
agttaatgtgggaaatttgttaactaaatttaaggttttgttgaaccttggaaatatgctgattttaaagagtgttagaaagcctttagcaagatgtcacaccttgttgtacatgagaaactttgaaaatggatcttcatatagaatcagtggatggaaacaagggtttaaacttgatacaaaaccttttataaaaaatattgttttaactactcaattattataaatgatctacatgttcagattgaaattgaaagctttaaaaattgtgaattatttgaatattcaaagcaatggagaaacaagttatatatgctgacagttcctgtgtttcttcttgttttgtacttaagcaccatatattagagttgaatttgcatatctgtttattgccttatgtaaatgagtgtggccatctgtataagcctctttgacattttcacccagctctttcttaatgtctgtgttggcttctgcatcagcagaaatctttttaaaagggttgttatatatgtaaaaaatgttaacaggaaaatgagagaaaataaagcagctgaggatacaaatgtgctggtagggagcgatattcaagatatattgtgaagtgtgaaaaagtaggttgctgaaccatgtatatagtatgttcccctttgtgtacaaaagggtatgtttgtttaacctctgtctcttatctctgtatgtgtatgtatctttgtatgcatatatacatgtatctgtatgtgaatagactttgaaaaaatacagaataaacttcatggtggttgccattgggcagaggagtataggactggggtctaggataggagcaag

SEQ ID NO: 16608 - DNA, 1570 bp, Homo sapiens
aaagggcgggagactgtggcaccttggaaggtaccacttgaaatgagacgtgctacgtgtttctgtgaagcttttccatgctgggcagagtagtctcaggcaaaagtgcctgaaaagatcagaataaaaactgactagaaataccgtcaaaaccagcacttaccaaactcagagcatctgagtagcagaatcctgttttgcttcatcaatctgaaggttatggccttttgacaagagggattctgaacgactaaattagtcagtttgctcgcttttgtttacttaaatgtatggttagatggtttttgatctgcagtcttccctagtcccccaaataagtaataataacttccatgctgcctgctgtgttccagatcacagaggcagccaaggctcaggaaaaactggggctttgcttatggtcagcctatgtttgattgcacagtctttgacaatagtagcttactaagactgctcagaatgagtaagctttaggaaactactaaaatgctgtgggagaataacaaaatccgttctctctcttcacttgacagaagcattaactgaattttgtttttcatagacccacttggcccaaaacctttctatattgcctgtagatgatcggcctgctggtgtggtagtaatctgatcacagatattcttaaatcagcagtgtggaatggtattagtcaaacatggtgccagtgtcttttacaaaaacagatggcatagtgtcagatgtaccttactctctgctactgtacagctttaggatttgtcatcacctcccggaaggtgtaaaaccccaggcttcctcttcttgtagtccatctcccagacttgtgactatggcttttcattcttcaattcatgacgagtgccaaacttgattttctctaggcacagctttctccctctgtgcctcctgcttcctttctctctcctgcctctcctctgctccccatcccactttctcatctgcctccttttctcacttctgtcagtctgtaagctttgataacctgcttaatactccaaagtgtgagttcctctgatctcttgattccttagttctaatctcacgttttgtttttaagagatggagtctctcactctgtggcccaggctggagtgcagtggcatgatcatagctcattgcatccttgaaatcctgggctcaggtgatcctcccgcctgagcctcctgagtatctgggactacagatgcgtgccaccaagcctggctaattttgtctcatgtcttctaaaaattattttgtgaagccccttcacaaaaaaccttaagggaaatctgatggtgctcaggaatctaactctccctaaaccatcctctttaactgcttctaaaatatctctgttggcctttcttagcctttttctgtttccattcagtgctccaagcgctttttgtttctaagttgagtgcttggggtttgacaggtagtgacgtgtagtttgacactgttaacttgttaaatacagtgaaaagtttgtgagtgaagaatgctgagaagattgtaatgctttgtacaaataaaagtcttgtt

SEQ ID NO: 16609 - DNA, 250 bp, Homo sapiens
agatggattatcttgcatgccagagcgctggaatggaataaaatgatggcagaagtacaaaccagatttagagaattgagtgcttgcagtcaagcagaatgtacctcctgcagagacaaatcttctgcatgagattactgatgcttcacttgcactctaagctggaatccaaactctggtttgtctcttgaaaatttgactctataaaactgatctgattttctgtttttaaaaataaatatatttttgg

SEQ ID NO: 16610 - DNA, 513 bp, Homo sapiens
gtgctgttcccagacaagaaaccaaacctttttcggttgctgctgggtatggtgactacggagcctcatttggtattgtcttcctttgtagtgttgtttattttacaatccagggattgttcaggccatgtgtttgcttctgggaacaattttaaaaaaaaacaaaaaaacgaaaagcttgaaggactgggagatgtggagcgacctccgggtgtgagtgtggcgtcatggaagggcagagaagcggttctgaccacagagctccacagcaagttgtgccaaagggctgcacagtggtatccaggaacctgactagcccaaatagcaagttgcatttctcactggagctgcttcaaaatcagtgcatatttttttgagttgctcttttactatgggttgctaaaaaaaaaaaaaaaattgggaagtgagcttcaattctgtgggtaaatgtgtgtttgtttctctttgaatgtcttgccactggttgcagtaaaagtgttctgtattcattaa

SEQ ID NO: 16611 - DNA, 1099 bp, Homo sapiens
ggccaagagacactcactggacaatatcaaaccatggctcctcctcagcatggctttgtgtctttcccagttatcttgaggggagtgggatgtagggctggtattctttgcttaggttcatttacaagatgtatcagtgttgtaagtccaataatttaagtccagtgattcaaaatcaggtatagagtccagaaacatggactacacataaggttctctatttaagttaaatacaaatgcaactttttagtgagcttttaggactactcttcaaaaaaagtgtattgctcagaatgatgacctgtaaatgtaagagtggcaggcctctgtctgtgaaagtcagaacacagggctcgagcctctggaactgaccctttgcaagtctttacaaaagaaaaaaggcagtggggagagagagtgttttggttacatcagaaataattgagatgggaaagaatagtgcagctccatagaggagacggactgtagacaatgagattaagcttcaatcactgctcctcagcaatgtgaagaatcaaagtcagggcaagaaagcgaaagcttggacttctattcaaagtggcagcagagtgggagggcggtacccttctagcccagtgctgctgagcttgtgtgaaaatcagacctgagatggcttgaagcagccaagaaccacatgggcattgcccagaattacaggagttagcacaccagctctacagataagaaaacattgaaattcaaagattaaggccaaaaatatctcacttgcaattttaatattttcatttggatttatataaatgaaacatatatatgttttggaatggccagagtgaggcaaaggggatccctgaaataacattagaacatacaggaaaaacgaggcaggcagatcactttaggtcaggagttcaagaccagcctgtacgtgcgtgcctgtagtcccagctactcgggaggctgagatgggagaatcacttgaacctgggaggcagagtttgcagtgagctgagattgtgccactgcactccagtctgtgtgacagaatgagaccttgtcttgaaaaaaaaaaaaacaaaaaaccacatacaggaaa

SEQ ID NO: 16612 - DNA, 181 bp, Homo sapiens
ggccagtgagggaagtggctgggccctaggccatggagaaaaccttaaacaaaccctggagacagggagccccttctttctccacagctctggacctttccccctctccctgcggcctttgtcacctactgtgataataaagcagtgagtgctgagctctcacccttcccccactaaccag

SEQ ID NO: 16613 - DNA, 1987 bp, Homo sapiens
tggagacagtgccaggcccaagaactagaactttaaaacgttcccggggcctcagacaagtgaaaaccaaagtaaatgctgcttttagaactgtgccctcatgccctcttcctgctcacatgctagcggggcccagcagccctgggtggttttgccagcatgctaactcttgtaactcgcagctgcatcctatgagctctcccaagcttccccgcccctcccctgggtcagccgtgaggcccacctttgccaccctcagctctttcctctggtgtggcttcagcttgaaagcaacctggagtcgggggcacagcctttggggcctggctgggagagggtcttggagcattaggggaagaagagagcagtgggatcttggggcctgagaagccttggaacgcttctggcagcagagctgggtgtgggaatgaggcctagatcgatatccctgggttagagttgaaatttgccgcaattccactggaaggcatttcccacgaggccagaggttgccaggctgcctgaggtctcctattctactctgaaccataaacccagagaagaattactcattaaccagcataaatactgcctgaggatcaaaactcagaggcaaagagggagttcctgactgctagaggtgccaccaccacaaacactttttattcaggagatactttttgagaatctctgctctgttcctaggttcagtgctgggtcctgggaatacagcaggacagacctcagcttatctcttcatagaaattatacaaagagaattggggagacagctaagaagaaaacaaagaaataaagcagttacaaattgtgataagtgctttgaaggaaagaaggggtctgagacaacaacagggaaggggcctctcttgaaacagtagttgggaaggaggcagacatgcaccagtgatgtggtgacaggtgctctgaaggaggtcaccaggacctgacctctttgaaggatcagaaaatacttccctgaaggactgacatttgagcctagacctgaagggtgagccatcaagctaagacaattggggaagagcattccagggagagggaggagttgtgcaaaggccctggggctccttctagctggaggaatgcaaggctagcttgtctggagcactgagaggatggcctgaactgagtggagagagacagaccaggaccaaaccatgcagaggtcaagggccacattcaccttttcagagtgactcaatcaaatttgtagtttgtaaaagtattttaacagctctgcggcaaagtgcaaatgaaaagtcttgatggcatggactggagcggggacagtggggatggagaaaggggaatggattgtggatgtgtttagaaggtagattcgatgtgaaggatgaatctggcttgaccttctgggtggctgatgggccatttactgagatggggcagcctggaagaggaacagaagcagggtcggggtggagggagaatactaaacttagcttgagacattttgcaataaggaagctatatctagagtgcttatgtgactcacctaaggccactcaacaagtttgtggcagaactggattagaactgcacagaaaacagccaagctgggatttgaacccatgtagtccaactccaaggcctctgcccctaaccactgtgccataccacctcccaataatcaacagcaaaattataggtctaacaatgttttatagacacccctccatttatgtgatgggtttgcatcctgataaacccatcataagttgaaaatatgatcataagttgaaaatatgatcataagtcaaaaatgtatttaatatacctaacctaccaaacatcatagcttagcctagcctgccttaaacatgctcagaacacttacattagcctacagtgggcaaaactatccaacacaaaatctatattgtaataaagttgtaaagaattttgaataaaaattcaatatttgaagtac

SEQ ID NO: 16614 - DNA, 109 bp, Homo sapiens
caactggccggtctgcaagtcagaggatggccagtgtctgtcccggggtcctgtggcaggcagcgccaagcaacctgggtccaaataaaaactaaattgtaaactcctg

SEQ ID NO: 16615 - DNA, 221 bp, Homo sapiens
aggccaagtgggaacccaggagactgctgtgtgacctcagactgggctccacactcttgggcttcagtctgcccatctgctgaatggagacagcagctgctactccacctgcagctgggctaggggcggggactgggggtgctatttaggggaacaaggggattcaggagaaaccaggcagcaggggatgaaatacatgaataaagagaggcatcagctcc

SEQ ID NO: 16616 - DNA, 1278 bp, Homo sapiens
cttcactgggggcccagaggcagatgggtgggtgggtgggcaggtggcctgccaggccaggagtgggctggagctgctgaggcccagaaggcccgcatagttcctcaccaggagggtctccctccagcacaggtcccgcctgctcagtccctgtgctttccaagtggagggggtgtcagctcggtcaccaagagaagtgacttcccaggagcaccagtcccctcacagaggtgctgtgagcgaggcctccttcggtccaggcagaacctcaggcagtctctcctggtcctgcatgtgtgcaactccagctaataataggtattttatatacagatggacagatatttttttaaactggggagttttcctgatcttgggtcctctttagggggccagacaagaaaggcctacggtttctggagcaaacctgtcccccacctgtgaccagtcactctggggcaagcatcactgggaagggcatagccggagacctttctcctagtgactggtagtcagtggggcattttaggatgtcagggccccagggtgacatgtgtccagcttttctatggcagcagaggcctttccctcagacaagctacaaagtgcccaggatgccatccaccatggtccccttcagtacctcacgcatggtccccagcttctcctaggatcccagtggcgtttatcagtggccagctacctgccaggcccgggctggggcacggtctgcggccatgaggccaggccgcctcccgcacccctaccccgtggcagcagcatacctctgcatttctggaatgtgtgtgcatcaatgatgtttgtatatttgaggcatttaaaaatctattttcgttacgagggcaaatgaagaatgaatattgatcttaaaaaaagaaaagaagacaaaaaaaatacccaaagccatccgtgtctctgctgtatgtcattaacttttgccttcaatgtcaagtttatggggtggtaggtttgatgcccagccaagccctttcccaggggacctgttgggtgctctgcctgcctccctctggtggcttctgtttctccagttttccccctttgcctatctcagaaccataaatctttcaactgcggagggccttgaggtggggctgcctagccaagtcccttttgactgaggccagagatgtaaatgaggcacacagcaagttgctgtctacaagagtatgcacctggactctccagtgctcctttctttcttttttttttcttttttctttttcttttttttttttt

SEQ ID NO: 16617 - DNA, 674 bp, Homo sapiens
aggccaaggcctgagggcctcccaccactgcccagcccctggtcccagtccctttccaccgttggcttcatcaagctccttgcggggttggggctgcatggccagggtggcaggaagacatcccccctccatcccagcccactggaccagaactgggagaggaagagagcaggacaaggcagacagaaggtcaggtcaggaactggtgctgtactgggtacacagtaggcgcccaggacaagtgggttgcaagacaggaagaaaggaaaaggaagggcagagtgctggtttctccaggttgggttgggggcactgctgtcccccctccagctaggacccagcccatccccagatgcctgagcctttgtccaaagtgaggtcactcgagaattcatggacacggcccccagtcagggggcatcttgcaagacctttagtgccacaaataagcatcgagcacctccccattcacacccccattcctcctggctccttatcccccatggtgtttattatttatttccctccccatgcccctggggaccccaaggccccagcttccctctgcacccccagcctatcccagaggccttgcaggtgaccagcagtgtcattgtatttatatacagagcttatgactttaatttttcaataaagaaatctgaacaaggtta

SEQ ID NO: 16618 - DNA, 1121 bp, Homo sapiens
gaggagagcaaatatcattatatgaaagtcctctgccaccgagttcctaattttctttgttcaaatgtaattataaccaggggttttcttggggccgggagtagggggcattccacagggacaacggtttagctatgaaatttggggcccaaaatttcacacttcatgtgccttactgatgagagtactaactggaaaaaggctgaagagagcaaatatattattaagatgggttggaggattggcgagtttctaaatattaagacactgatcactaaatgaatggatgatctactcgggtcaggattgaaagagaaatatttcaacaccttcctgctatacaatggtcaccagtggtccagttattgttcaatttgatcataaatttgcttcaattcaggagctttgaaggaagtccaaggaaagctctagaaaacagtataaactttcagaggcaaaatccttcaccaatttttccacatactttcatgccttgcctaaaaaaaatgaaaagagagttggtatgtctcatgaatgttcacacagaaggagttggttttcatgtcatctacagcatatgagaaaagctacctttcttttgattatgtacacagatatctaaataaggaagtatgagtttcacatgtatatcaaaaatacaacagttgcttgtattcagtagagttttcttgcccacctattttgtgctgggttctaccttaacccagaagacactatgaaaaacaagacagactccactcaaaatttatatgaacaccactagatacttcctgatcaaacatcagtcaacatactctaaagaataactccaagtcttggccaggcgcagtggctcacacctgtaatcccaacactttgggaggccaaggtgggtggatcatctaaggccgggagttcaagaccagcctgaccaacgtggagaaaccccatctctactaaaaatacaaaattagccgggcgtggtagcgcatggctgtaatcctggctactcaggaggccgaggcagaagaattgcttgaactggggaggcagaggttgcggtgagcccagatcgcgccattgcactccagcctgggtaacaagagcaaaactctgtccaa

SEQ ID NO: 16619 - DNA, 1087 bp, Homo sapiens
acagtttctcttggccttcaggaagaaagcgcctctctaccatacagtatttcatccctccaaacacttgggcaaaaagaaaactttagaccaagacaaactacacagggtattaaatagtatacttctccttctgtctcttggaaagatacagctccagggttaaaaagagagtttttagtgaagtatctttcagatagcaggcagggaagcaatgtagtgtggtgggcagagccccacacagaatcagaagggatgaatggatgtcccagcccaacctctaattcactgtatggtcttgatctatttcttctgttttgagagcctccagttaaaatggggctccagtaccagagcagctagcaactctgccctaatgggaaatgaaggggagctgggtgtgagtgtttacactgtgcccttcacgggatacttcttttatctgcagatggcctaatacttagttgtccaagtcgcgatcaaggactctctcacacaggaaacttccctatactggcagatacacttgtgactgaaccatgcccagtttatgcctgtctgactgtcactctggcactaggaggctgatcttgtactccatatgaccccacccctaggaacccccagggaaaaccaggctgggacagccccctgttcctgagatggaaagcacaaatttaatacaccaccacaatggaaaacaagttcaaagacttttacttacagatcctggacagaaagggcataatgagtctgaagggcagtcctccttctctaggttacatgaggcaggaataagaagtcagacagagacagcaagacagttaacaatgtaggtaaagaaatagggtgtggtcactctcaattcactggcaaatgcctgaatggtctgtctgaaggaagcaacagagaagtggggaatccagtctgctaggcaggaaagatgcctctaagttcttgtctctggccagaggtgtggtatagaaccagaaacccatatcaagggtgactaagcccggcttctggtatgagaaattaaacttgtatacaaaatggttgccaaggcaacataaaattataagaattc

SEQ ID NO: 16620 - DNA, 631 bp, Homo sapiens
attccagggaccactgggtgagagaggaataaggcccagagcgaggaaaggattttaccaaagcatcaatacaaccagcccaaccatcggtccacacctgggcatttggtgagagtcaaagctgaccatggatccctggggccaacggcaacagcatgggcctcacctcctctgtgatttctttctttgcaccaaagacatcagtctccaacatgtttctgttttgttgtttgattcagcaaaaatctcccagtgacaacatcgcaatagttttttacttctcttaggtggctctgggaatgggagaggggtaggatgtacaggggtagtttgttttagaaccagccgtattttacatgaagctgtataattaattgtcattatttttgttagcaaagattaaatgtgtcattggaagccatccctttttttacatttcatacaacagaaaccagaaaagcaatactgtttccattttaaggatatgattaatattattaatataataatgatgatgatgatgatgaaaactaaggatttttcaagagatctttctttccaaaacatttctggacagtacctgattgtattttttttttaaataaaagcacaagtacttttgagtttgtta

SEQ ID NO: 16621 - DNA, 623 bp, Homo sapiens
gggagggtattgccctccgtgagcacagagactctccatgggagggggagcagtattctcctggatcctggggcctgggtgggctgggggacagctgaggatgggcctagcagatgaagcttgccagcaaggccaaagcaaacggtttctcctgtggatagtggacagagacctttgtaaccaatggaattattcatttttctctatcttttattttttcaaagatattatttgactctatcaaaagtctctcctttttaaaccttttcttatggatggctgtcaatcccgaggcagaagttttcaggtggagaccaagcggcctttgctcttcttccttcttcctgccacactctgctttcttcctgccatggacccctggaggagacctatggagggacagttttgacctgacccctagaggagacagttttgacctcttcagcaccaggaaggaagctctgaggatggttgcagtgaggaagcatgggtctttaaggacttctctctcttttttgctggacattattgagtttgtgggaccctgcctcttcctgctacctgtgggtctgcccagagtccctgcaggcctgtccatgcattaaaaattcctattgtctctc

SEQ ID NO: 16622 - DNA, 454 bp, Homo sapiens
cccgggactccttgccatggacttttcctgttgttgtacacacacaacagaacaaaatgaagcaaaacaaaacaaaaaaacccacaaaaatttgtaaaatgtaattaatattcaaagaaaaggaggaaaatcttcatttgttggaaatgaaaacgttctagcaactgtataaaagcgttgggcatgtttgttatttctatactcactctgtcatgaagaagggtctcagccttttgtggagcattgagggagttgcttcttaggcctcaggtgctgtattgggggagaagggagaaagcatatgcaatgaattgtaaagatctctgctgtgcaggtgctaagattaaacactaaaaagaaagagagatatatgtaatgtacaactgacactgccatttttcctttttggaggaaatggacatagataaagaagatatttcttcggttaagattt

SEQ ID NO: 16623 - DNA, 366 bp, Homo sapiens
gaagaactttcagccaataaagcttgtgcttcccccaccgagctcacgctgtctctttgttccaagtgtggttcctatttattgaggaagaaagagctgtctggccaaaggaaatctattttttcccttcatgttttctctctgaaagttggcttgagagttgttgtcagaaaggtgcaggtgctccacaaacgggtggtaaaaaggcctcgagctcttggatgttgtatttcagatcaggggcaggcaccggagttgaggctgtgcgccttggtgggcttcacgtcttcccctggatttgcttagtactcagccagtgccacagtttgaagattctcattaaatgattcatttcatttcaccttg

SEQ ID NO: 16624 - DNA, 7583 bp, Homo sapiens
caccatgagccaccaccgctgactgactttgggtgccggggctgcgggttttgggtgcaacctctgcggcagccgactgcatgaaccaaagttctcacctaatggtatcatcacgcagtgcacaatcatttatctatgttttgccaggggccagggctcggggtgggggagggcttgttttattgacatacaacgcagcatgctaatggggtacaccattgacttcatttgtacttagttatgttggtcagtgttagaggatgcattttgggttcatctttcttgagtggagtattggttttaagtaaagaaagttaaatgatccattaatctgctaattggttgcctatgaaatcacattgtctgttattaaagctttttaccatagcctttttttcttttgaagttgaagcaaaggtgctatgatgttgttacagcaactttcctcacacggggtttagctcttataagagccagtgttaaaacttccaccaaataccagtttataaacttccaccaaataccagtgctaaggaaagtctgtcttccagttcaaatccaattctgtaaattgaatgttagcaactcattctaaaccttatatcttggcagagtcaaggttggccatgtttaagatgtgagcgagttctgtagtttttgttgccatgtcggggaagctagtccccggcagcctggatgactgcacagcggtgccctggtatagcagaaaagagcagtgagctggaaggttagagaccgggcctcttaccctggaactctgcaccctctctgggtcccagcttccttgtctgtacagccaggtatgaagctcagtgatttctaagattctttctggtccttcacctactgaaatgtgtaaaagttgatcatgtatttttgtctgatccctgattcatggtttctttcaggtcggataatatttaaatgaaatgactgttacagagttttctataagaacatcaattatatgaaaaggatgaataaaagggaaatgtagaaaatatagctgattccacttagacagtttaagtaattggttgaagaaatgctgatagaagccatggtttaaatagggacacagtatgctatactagaaggatacctgaacccaacctaacttcctcctttgcctctaacttaatctgcagcctcaggcaagttaactttctcttctaagaccatcattttcttcatcttttaagtgagggaattgtcctagatgagggctcacaaacccaaatgcctaagggagccgtgcaggtaacataaatgagtaaaacattctggggaggattgtgctgtcccctggaaagttgatctaatagggcagttattcagctctgttttgtcattaggagaagcaagcccagggttggcaggtcttcacattgtttcaggaggagctagaaatccagatttttatttgaaatcctggatttttaaaacgttacaactgattaaagaaaatttgaaataaggtgagccaaacaaaacatgtccctgggttgccagattgtgtcctcctccctctctaaagttaggtaattttgtgattcagcagtggaaatgttagtggtcacaatcagggagagagtagagggagcaagcagtagaaaaatctcagccgctcttcagctgtctccccttgtattacaagggtggtggggagggatgtatttcattcacagaccaataggaaggtagtttgaagatgaacataagaattggaacctcagtgacagcttatgtctgggaacatgagttattccttcttgctgactccagtataaagcatatccattttacaggtgagaaaaagggttgctggcagagctgagaatgatgtgaactctagagtggggacctatctcttgcagaatctgcattagcatagagccagactctggacctctgagtgctgtgaagttgatagaaattaatggtgaatttcaaggacagatatcattaatatccatgttgaaactctgtggggtttaagcaaaagaacaatatcttcccccatcccacaaaatctgggtttaatctatctcacattgagttctgtgcatcagctctgcttagtactctagaaatagaaccggaatcacaactgaatctattttgcagaagccccaggagactttgggcaatgatgatggtaaatgactttttactttattattatttttttttttttgagacagagtttcgctcttactgcgcaggctggagtgcaatggcacgatcttggctcactgcaacctccgcctcctgggttcaagtgattctcctgcctcagcctcctaagtagctgggattacaagcatctgccatgacacccaactaatttttatatttttagtagagacagggttccaccatgttggccaggctggtcttgaactcctgacctcaggtcatccacctgccttggcctcccaaagtgctgggattacaggcgtgagccaccacgcctggccgagtttttactttttatcgagcctgaacagataactattactgatctaatgaccatccccaccctacctcactttcagatctatccaatagcttcaaagggcaagtaattataatcatttgtgggaaaagttttattaaaaagtgacaaacttgaagctgtatatagtatgttctatttcagtttttagtggtgaatacagaagtcatcaaggtggtacttggtgccgctggaattttttttttttcctaggcagtcttgctctgtcatacaggctggagtacagtggcatcatcatgcagctggattttgacagcagaacttcaggcagtaattggagtcctaatgtcagttcttccttatggaggcctttatttggcctgagattttattcaactactttatagatgctgggtttattcatactatcgccagtttttataaaaatggaaaactagctcatcctttttgcaaaagaaagcaaagtggggagtcagaatgagaagtggataggggataactaaaactattctttactctcctttcattgcctttgagagctagctcttgcacacactgactttggcttccttagcgcataggtaagggaattgcctttccctcttttgtgaatattctcatttctgaaaaattctaagtcatgagaagataagccctatcctttcttacaaggattggatttcttgggtgacactgtggtgtggtggaagccagcggcttctttcaggttcataaaggccatcataacaacttcaggcttcatggtgtggacagggatccaggagagctgagtggatgtgtgaagtttctgatagattctgtcatcattccaaaggaatgtagtttcctccagctcaatcatttgaagtaatacacattgccaaatctgactgtaacctgacattttagacctattggagaaataggaagaaagcccctccagtggaaggactggacttggaagaagttctgcaggaaggtgcatgcaattggatagctgttcatgagtgaaacgtggggaacattgctatgaaattgtaaggtttgcacttcatttttcgtagtttaaaaattgctctgttctggctgttgaaaacacttggtgtgaggtttgaatgaggattatataatcattctagtattcataggaaaatgattactgctctctatttgtaaaacaaaagaaataactttcggaaacagtattttagacatgaggaaattgtttgtattaggcattttgatctaacagaatcagctaaggatagtggatcctggctttacacatttctttgaccaaacccagctggcaacttgaagttgttactgtgtggcttccagattgcctagaggtgaatcctaccaacatcactgttttttttgttttgttttgttttttttgtatgtttttgagacagagtcttgctctatccccaggctggagtgcagtggcgtgatctcggcttactgcaacctcagcctcctgggttcaagcgattctcctgcctcagcctcctgagtagctgagactacaggcgcgtgccaccacgcccagctatttttgtatttttagtagagacgaggtttcactatgttggccaggatggtcttgatttcttgacctcgtgttctgcccgcctctacctcccaaagtgccgggattacaggcgtgagctgctgtgcccggccccagcatcacttttatagctttctgtgcctcttcctctgggccttggtgtatgaagccacttgcctttctctgttgggaagcgagcagaatcagattgctactcatgatgcagtccgggcagggcatactgtcacctttgcctgtggacacagttgtcaggataggggagaagccctttaggtccgtcttcttgacacagccctcctacctggttacgctggtgctttcgcttggtttagacaaccaagacacttgagaattatgctgtcctcagaatgtctgatgaaaagaacagattcacttttttgacacaatgcccattagccatctttggcagtgtttctgatcaaaggttccccatgcctgctctaggaaagtaaacttttttcagaataaatcctcaaatggattactgagtagtctttgcaccattcccatcagcctaatcagactgaatggtcacgctcagtgcaaaaagctgttttgctgttaggatgtttcagtgtttcttgtctttcctggaacagttcagttgtttaaatttagtaattcaatcctgaccagtgtaaacccacttaattattgcagcctaaagaattcagctacttctactcttcataaatgtgcccaagtaaatatgtgtttttaatattcaaccctggaaaattagtaattcagatgataaaagctcatgttttggtgtctttgtactcagattgtgaacaggcatatttcactgatttagacttagtatacttgatgagaatgctcaggttgaagagatagttctgtcagcaatccaacatctatagcaatgtggaaaaagtaatcaactcatatttcacgaatttgatgtatgttgtgatttagagggcatgagataaagtttatatttgaactgtgtggggtagggggaagaagaggttgcttaagcaaatagtggggtgattgtggaacaagatgtctctaagatgagaagttattttcttgcatcatagaagcactctttttacccgtgagtgattgtgttaactataaatcatttatatctgtacattaaagcagattccctcaattaggcaaatttggttagccaagcccaagttattgtttgtacttgaaagtaataaagctgcatttccttaaaaatatattctgtagttaagactttgtcttgctttccccccaaccacttcagacattttatccaaccaatgcagggacttttcaaaagtcagtgtgtttttgaaaatagaacaaccccttgagtgatctgaggtggctctgtttttttactgtttctgcatcttctagaaggtaaactcaacaatataaccatttctgaaggtgatccaaaaagcaaaacaataaaggtaaaacacaaggaaataattttggtgaatttcatgaatagttgcaaatgaagggatggggtgggtaaaagtcccattttgcttccagaccttggaatagtcttcctctcttttgcccaaggatgtgtctatccagcacatctttgcatgagttctttcttactaacttaaacttacggggcttcttgtcatttgagtaccacggccctgcacctttgatcccctgacagcatcattaagggcagattgtcattcctgttttacagatgagaaagctgtggcttggtaaagtgattcattgcctagaggagttatagtaagtggtgaggctgaagccctgattttcagcccccacacacctggattttttccatgttttcatgtttgtctgttctttctgtatttcaagtctcttcaaatcccgactgctgccttctgccttcaccacttgtgtgcactgttcaacctgtcttatgctttgcttccagggagtctccccaaccacttctttgagcacttacttgctcttgttcaatcttggtaactctccgttaccatcagggcacatctggattccttaacatcatggagccctagctaatttcttcgagcaaacagttcttgctcctctatttatttccacccttgcgctttgggtgttaatctcccatcctcgtggaaagttcttgatgttcctttccaccagtcctagggccaggctttaatcccattgatctcccactatctttaaagcctctgctgaccaccataccccactccagcctcactgagcatttttgtgtaaggttagtggtgcagttcatttagcaataaatactgttgtaccttttgcagtagacaactattaactttcatccttgattctcagttttttccaaaatacaagtgaatacctggtttccccagcaacattgtaagattgagagtaggaattcattgagattttaatgaattccatggattgtcttaagagctatctaaacttggaagaaaaataacttccagagcatctaaaattgaaaataaaagatcagaagcaaatgaaagatcaattccacacagcttttcctctcttagacgtccctcttctgccatatcctgtaaacatctgaagtgttctgagtacatttggagagaatatttaatgatcacactgtgattagacatgagtagtccctgccagtgggatgttcctgtcctttgcattttaaccacatgttctgtgctctctgtggtaaagataatctaacagtaataaaaacttatggagaaaattacccagagctcctttatcattacgatttttaatactctcttctaatccttatgcacatgtgtatggatttatgtactgcaaatcattgttttgtaatacattctcaaaaatgtgctttaggtttttacaactaccataatattttgtaattttccttcattactgtaatttgctaaaccatttctgttttggtagataattaggtagtttccagttctgctttttagaagatactacagagaacttctttgtgcatatttccttagaacaagttccagtagaagacttactcgcaaaagcagtggaattttttcttagtattttctgttacaggtacagaagagtgcatacaacacacagttttgtcgaatagttatgaagtgaacacttgtctaaccactgcccgagtcaagaaagaacatttctaaacatgtttgccaatttaatagatataaaggaagtatctcaaggttgctttaactgacatttctttaacacatgacaacatttttatgggggaggggactagagagaaaatgacatatttttatgtgtgcttatttgtatctcttgaattctgtctgcatcttttacccattacactttcaaatacttgtgaaatcattggtcgagatgaattatggctataaataaaatttcactaatctaattatcactgatttagaaataatagttcaaccc

SEQ ID NO: 16625 - DNA, 1850 bp, Homo sapiens
tttcttctagagctcatgtagaggaccacgttttgaccaaaacttctcctaaggcatttgactccatctatatttcacaaaagagacttcctttccccaagaattatcatggaatgtcagatgttactttgttaccaacactgttatatttctacattgaaatgcaaagtggaactaggagtttggaatgcattaagagcagacaagcttggtcataatagatccagtgtttttcagattcctttcactgccttaatctttgcaacagggtggaagtttttttcttccctcaaaattttcatggacatgcaatcttatctaaaagcctgcttcagggctgggcgcggtggctaacacctataattcccagcactttgggaggccaagatgggcaaatcacttgagtctaggagttcaagaccagcctggccaatatggcaaaaccctgtctctactaaaaatataaaatcagccaggcatggtggcgcacacctataatctcagctactcaggaggctgaggcacgagaatcgcttgagcctgggaggcagaggttgcagtgagctgagatcttgccactgcacaccagcctgggcaacacagcaagactctgtctcaaaaataaatgaataaaataaaaacctgccaccaaattatttctggattctcttcactatctttttttttctttttggtcctttttccatttctgattccactttcaaagtcttggatatattctttgaaaaatgagtagtatggaatattaagattatgttccttatactcagaatactttttatgagctctcttgtttttttgttactattattcctttgaaaaaaagacaaaatatctaaaaaatgtttatagtgttcatgtaattttttttgctgtttaccaatgaactttgccctgttgtggttttgggggatcagaaggattcctaaactgtcatttcatttattggtaggtcatgattgctgagggttttgctttggatttttcatacctataaagtcaatcttgagttgatcagagaaagggaaacttactcctaataaacagactcagaacagaagggacatatgcataaatcaggataccatctcattaatttacaaaggataatctttcttttcattgacaacacctacacccacctgttttccagtgttcttctctctaaacagcaaagccaaagcactctgcacaccaaatcacctgttcagaggtttatgcatgagcatatttcttttaggccgtggtgaagttgataaaccacccctgctttgtaacaaaattattttaaagtgactggaattatctagtccccagattgatcatctcccctggcaacgtgactctgttttttgtgtgtgtttccatgctgactagtcccctactgttaatatcactactaattaggctataaccaggtctttcctggcctgagaaatattctcttaaaatgacctttgttttaatctcattcatgatgttgattttttttcaatgtggtgcaatatatacaataaaatttgtcataactattttaagtgtacagttcagtatattacatatgttcataagttgtacaaccatcaccaccatccatcttcagaattattttcatcttatacaattgaaactgtattcattaaacaataactgtctattccctcttttccccagcctctggcaaccaccattctgcttcatgacattgattttattcacttaacatcagattttggggggatgccctctctcctatgtatggtctacacattctgattttttttttagattgaataaaatttgtaaatcattattttcatttcataagt

SEQ ID NO: 16626 - DNA, 2291 bp, Homo sapiens
ctagcccccgggggtgccaggggtcctgaaaaccaaaggaggagcagcagaagccataggctccccagctttctccaggctggggtgggagaaggaagcaggacagagctgcaagtgcctggcagaatgccctgcctgcctgcctgccaggccaaggcctgcgtctctctgctgtaccagctctgttccagggcctcctcaggctcgttacccctgtgcctgtgtctctacacactccacaccccctcaaactctgtttatctgttctctgaccttgtgtcccctgcgctgggacccttcctcctgaggcccaggtctttgtccccagttgtgtgccttgacctctctcgcccctttctgggtgtgttcgcacatcctgtgtgtgcacagctgtccctccactggatccccttcacacgtgacccgtggggcagccagtcctcccagggactacataacaggcacctttgagagagcatgggagaaggtggataagaggatgctgctcagtgcttttctcttccactttcctgccactccccactaccctcggagagaggtggtgggatgggagagagcccctgtgaaagcctgtgaggatctgaagagtaaagggctgggtctgcctcagaaggcaccagcaccagggcccaggtattaaggctgagagtgaaggctgccaatgtcagctttggaggtcccagaagtcttctgttctctggcctcaccccctcagtcgccatagagctgggcctggccttgctggaatggaggcatccttccaaacctgggggacgggggtggggggtggtagtggtgggagggaaaccatgtcttgctaaacctgtttctggtgcctcccatccccagacccaccagacaccacacagcagacaatacacacccactcgcacaagcttccatccacatgtgttgtactttcagctctaggcatgcagacaaccccacacggccacaccaccacatgcccaagtgtacacacacagagccacaccgtccctctgggcctgctggctcctcccttggctttcccttggcccacttccagggcccaggtgctgcaactaaatgtgaaagctcagtggccgctccttctttcagcccatcaaccagcattggtcccatagggaagcacaggggactcaccctctttcatatcccttgccctgccctgaaatggacaatcactttttgggataggttgaaatttttaaagagcctgcatcatttggttccctcaaagggaagcccttgccagtgggggtttgaaagagaatttttggaaccaacattcaaattctgcctcatctggagggaaaccaaaattgggagggggaagaggacccctgatgttttgctgcttccagagatattagaaactgactcacttgattggaaaatggacaaaagtgccttgacgtggagggtgggcaccagatggggaccagccttgccaactgctgctgtggcctccagcttggctggttttgcaggccgccagcaggaaggcgaaggtggtagtacagcaagaggcactggcggggcagcaggcctgcaggagctgtttttccattgctaggcctgacccctctctacctgtgagcgttcagggggtccctgagatagtttagatgcccccccatcttagacctcagctcccacagtgccttttaagggggacctcacctcctgtgcacagcccacccactttcctctgcttccctggcacagcccaggcatagacgagctggcgttggacccagttcttcccccttttcagccccacagctgctgccacaggggccaactagggccaggtggaaggggagctgagaagccaacccctagcccaggggtgctgtgggaactgggatccaatttgtagcttcctgcctggcttcagagagcccagcaaccttctaggcctgctttccagacttctgagatagcctgggatgagcaatcctgttatagtacatctggaccttccctacctgggctctggggaggctgtgggcctggagagggaaaaggagggagggggtgtctgcaccacctgggaagatagcacaaggcctaatgaggtcaccctgactccccaccccagcatttcattcataccagataatagctgcattactgccaactgaccttataaccctctgcaccttcaaaaagattcatggtttttaattgctgcttttaataacatttgttaaagttataattaatgtgtctgatttatgatttaaaacctccctttgaacaat

SEQ ID NO: 16627 - DNA, 110 bp, Homo sapiens
actccctgagcctcagtttcctcaactgtaaagtggagatgggtttggtgtcgggaataacgggaccaataaatgatgctttactattaaaaaagaaaatccatgtaaat

SEQ ID NO: 16628 - DNA, 2626 bp, Homo sapiens
ggtgggcggggctcctgagggagctccaactcagaagggagctagccagaggactgtgatgccctgcccttggcacccaagacctcagggcacaaagatgggtgaaggctggcatgatccaagcaagactgaggggtcgacttcgggctggccatctggttaggatggcaggacgtgggctgggcccacaaaggcaaagggtccagaaggagacaggcagagctgctcccctctgcacggaccatgcgacactgggaggccagtgagccactccggccccgaatgttgaggtggactctcaccaaatgagaagaaaatggaaccaggcttggaaccgtaggacccaagcagagaagctctcgggctaggaagatctctgcagggccgccagggagacctggacacaggcctgctctctttttctccagggtcagaaacaggaccgggtggaagggatggggtgccagtttgaatgcagtctgtccaggctcgtcattggaggtgaacaagcaaacccagacggctccactaggacttcaaattgggggttggatttgaagacttttaagtttccttccagcccagaaagtctctcattctaggcctcctggcccaggtgagtcctagagctacaggggttctggaaacattcaggagcttcctgtcctcccagctcctcactcaccttcagtaacccccactggactgacctggtccacagggcacctgccaccctgggcctggcagctcagcttccccaacacgcaggagcacacccagcccccacatcctgtgcctccatcagctaaacaccacgtcacttcatgcaggtgaaacccagtcactgtgagctcccaggtgcagccagaggcacctcaagaagaagaggggcataaactttcctcttcctgcctagaggccccacctttggtgctttccagaatcccgtaacacctgattaactgaggcatccacttctttcagcagactgatcaggacctccaagccactgagcaatgtataaccccaaagaaataatttttagaatctctttcgaagttttcctaaagtgtatggtttgggagttgtttgtactgagccaggtttgaaaaggccattgctgagtttgaggtggtgccaccagttttgcaggtggcatcagaggctggcatgctggcaggaacatcccctcttagccccagtcttctcttttctataatgagacccaccccagcttgcctccctccctggcttctctgaccctcaaaggagatgccacgcaggacagactggagagagaagcctgggcaatactgcccgcctgtcatggcctggtggtggcccacacctatcttctcaccttggaggccacacccaactttccaaagaccctgagacaagtcaggaccctactactctcccctgctgctttcctgacagcttactcttcctccacctgctgagcctgtgccagactccattgctcaaatcgttagggttgcttctataaaaatgggtcagtagcccttcctgttctctccagcccagcatacaggaggatcaaaggaggtgacggagcatcgtggcacggcagtctcaatgggtcagaaacccaggccagctgggctctaagcctggcatcctgtcatgcttagtccttcagctgaagatcagaggaagcctctcccttgccctctccagctctaggggttttcaggaggcccaactgcaataatggagcactagtgcttttatgtgcaatggtgtcgtccatgcacgacagcagcaaacattctggggctgctttttattgttcccacggctgacagcgtggcagcggagactgtggaggcagtggagactgacttcttcctgctgacagctggatgtcacacatgaaggtctggcctagcgagtgatgggtctaggccctgaaactgatgtcctagcaataacctcttgatccctactcaccgagtgttgagcccaaggggggatttgtagaacaagcccccatgagaaacagctgttactctacacttttgattgcctatttctgatggcaagagatacatactctcttcaaagagcatgagatgcagccattctttcagcaaagcttcattgacacctgcacctgttaactgtgttcgacattgaagggagaaaggcaagatgtgcactctggactcaagaaactcttagttcagtggaggaaatgagcagataagtagatcattatgattgagagtaggagaagcttagagaaagcacagaatcccagatccagctggtgaaggagggaaggcttcaggcctttaagctcagcctgagaatattgtgaaatgcagaggatggggaaaagggaagagtaccgacttgaaaacggagagctgtcttggctgagggcagggtctgtgtggcaggatgggggagggagtcagaagggtcagatgaactggagtgtagacagcatcagatgcagcagtgcccaccgcccccccccccaccccccgccctgcccacagagcacctgctggtaaccctgggcctattgaaagcaggatgagatgataatttaagacactgaatgatttcttttccaacaaagctctatgttaagtgc

SEQ ID NO: 16629 - DNA, 403 bp, Homo sapiens
aattcctgaagttcagctgcatacagtttgcacttatggactcctgttgttgaagttcgtttttttgttttcttctttttttaaacattcatagctggtcttatttgtaaagctcactttacttagaattagtggcacttgcttttattagagaatgatttcaaatgctgtaactttctgaaataacatggccttggagggcatgaagacagatactcctccaaggttattggacaccggaaacaataaattggaacacctcctcaaacctaccactcaggaatgtttgctggggccgaaagaacagtccattgaaagggagtattacaaaaacatggcctttgcttgaaagaaaataccaaggaacaggaaactgatcattaaagcctgagtttgctttcaa

SEQ ID NO: 16630 - DNA, 3258 bp, Homo sapiens
tgacctctttgctgtggcccctcatttgacctttcacctctgtctgttggaagcagtactttttactgcctcattgtcttctgtacatcttactgggtttaattaaaaaaaaagaaaaaactctgttgtaaaaacagtttaacacaatactaaactgctaaacaactagatgtaatcaggttatcaaaggcaagtagagtaataaatctctcctgcatggtaaatctagactttttttcccccttgtcctcgtgataagtatgtcaccaatatatgatttaaaccgagcactgatgctggacttcatgatttttaccctccctttggcaaggctttgtctcactgtacggtttaatttggtgatatcttaagcctttcttcccatccttaactgttcaagtatgtctgttgtaaccaataagtttattgctgtgaaattacttctgatggtagagaaggggttctataactgcttttgttttgttttggataaatttcctgttgtgtgggtggcatttttcttaacgagatttgcttctgtcttagcctcacacagggaaaatatccatttatcttctctctcgtgcttaattaatagctttatctttttttataccattttatccttttctctttaacagaaagtaaatatgtataaaatttgaaggaatcgaactaacaatacattctgtgtatattattttaatgaagaaaataaattgattactggcattggaacagtataaaataccagtttgtacagtatgacctatatgtgaccatgttactcccttccatttcacacaaagaaatagacacaactgcagttcacaagtagtactggctccaccccttggtgctggcagtgtttggggacattatgctggaaagagctcctagcatcagaggattaacactagcagattctgttccatctttgcactgttgcttacctgctgattttcttaactgttcttgtgcaatcgacaatgtgctaacctgcttttctctttttgtaaacgtttttgcattacaggctgcattcttgccttactgtatagaaaaagaaaaaaggctgggtttactattgcacattttaagcttttatacctttatcttcttggaatggtcagattctgaactggacagtcagaaccacaggtctgctgttaagggattttaaattgtgcatttttaaccctacagtgaaataacttaagatatccctgtgttcacagtgtgaggggctgttttatgtcatgttggcataaattgttttgtaaaagggaaagtgtttctaaaggtgtttcagcgcttgtgctgatacaaagtaagttattactttgcaccaggtggtttggccactgaattaatactgtatagcaagagaaacaatcttatttttttggacaacatgttttattaagttcttcatttctgttgattttttttattgcatttatgattcagtggctgggaattgagaatttatttgaaatagaataggtaacacctcagcgtactatagaaaatgcactcagctcaactgctgtgtttaaaatacacattttaaatccctctttacagacactaacataaaagtacatctttctgggttgtaaacatgtggtagtaccagagtattgtatagtcaatgttaaataaaagccaaaactggaatgtgcagaaagtaggctttggttaatttgtggattcatttttatttttgtctttgtttaactttttaaaaaataagatttctggagtagattggtatattctgttaaagacttacagtgatccattttgcttacactgttgcatcacaagggactcacccagggaccatgacctgctggtgtgtgtgtatatttacaaaaacaaaacaaacaaaccacccattgggatataaggtagcaatcacaaactaaagactgcggcttgttgaggtgcaataccctgactcccaaagttagttacagtgggttttattgtttttgtgactgaaggatttattcagactgctgtactcttcatttgatgtaacaaaatgctattaatctaaatatttgtaaataaagtacctgtatctagattaaattaaaattggttgcattattttctgaactataatagggtttttcttcaggtgaacaatttgacgtgtcatcagtttttattgcagcactgtccatattcattgtataaagagaggtctacgtatgtagcatataaaaccacatcactaagtaatagacccacagctttattcttgtgtttacattacccttgaaatgttttcagtcaacccttttcagtgtaagatcagcacatttggtggctgatgctgttctcctttgactgtaccgggagccagattctatcatatgcatgtgtaatcccctgtaatacactcaggtgctcacaaatagagcagattgtcatattgtaacatgcgtgtgccagacaccgggcagtacactttggaaagaatgtgaaatccttttaatttttaatccatagcttactgcttgtgcagtcacctgcctcttgaggttgctcattgcccttggacctgtgaggaggccttcagattagtaattggtgcttagtactatttatgcttaaatagatcttccagtacaatgttgaagtcttttttatggataataacgtgtttgatggagtaacttattatttttttttggttggtggtttacacgttaatagaggtagtacaatttctttggaaaggtgtcttttgaagccagctgttaagcttcatacattacctcccttctcaaattcggtaagacagtagttttggggaacttttttgcccatgtgtcttttaagtgtgattttaaaaaaatgagtggttcagttcattcccctaaacagaagaaaagaccaaataattaccttccattcctcttcatgtgggaatatagagagggttcatgtggcattttagagaaaagataatttatcctcattcaacacaggcccagaaaattgtgtcccagaaggatgtcagtaattgtgactaggccaggccttttagcattttgctaagacttgaaacaaaaaatgtaaatacaaaagaaatcaagttttgttttgaaagatgccttctagaacttactgtgtattaataaattgtcactttcattgtctttattgtaactccattgatcccgtatcttaacggttcacgtctagccaaataactgttttggaataaaaaccttggtggtg

SEQ ID NO: 16631 - DNA, 2126 bp, Homo sapiens
tgtagagatgagcgctagccttccaagcatgaagtcggggaccaaattagcctttaactcataaagagagggtagggcttttctttttccatatgtcaattgtggtgttcccagaatgtatagcagttataaaaataggtgaaagaattgttagcttgtaaatactgagagattggtgatttatataaggtaatctgttagtcttaaaatagttaaaagtttgtatttttagattattatgtagtaggttagatccctcttgttttgacttccactgactcattctgaaccccctaagcacccaggccagaggcaagaacctgggctgtaactgccacctgacaccgctgactggctaaatgctttgcagaaagtgatgaccttacaccacaaccagcttctccaggtcatatgtgccttacctccagagagtctttttttttttttttctgagatggagtttcactcttgttgcccaggctggagtgcaatagcatgatctcggctcactgcaacctccgcctcctgggttcaagagattctcctgcctcagcctccccagtagctgggattacaggctcatgccaccatgcccagctaatttttgtattattattattgttttttagtagagacggggtttcaccatgttggccaggctagtcacgaactcctaacctcaggtgatccacccacctctgcctcccaaagtgctgggattacaggcatgagctaccacacctggtttggagagtcttaattaaggaaatttccctaatgttcatttattttctaaatccagaccgtgtttcagaataatccttacttgagagtagccattttcttgcctgtacttgtcagaactagaggaaatagccaagactaatgaaaaagattactctaacccttaaaagacttttaaattcactactagagtggtcattttaaaaatacatccatgttttaacttatttgagccttctttatgagtaaatgattcctccttgttctgtctttcaaaccagctaaatatttgtcacaaaagtgcttttttctcactgttgcctattttcatatatcaggttttaaatagttttaattttttaataaaattttctctacgttctatatgcaattgttatatatctatttgaatagctgaaggactaaaatacttttttaagagataacttcaggaaaccattatattttactatctgcatgctgttaactgtggtacactgtgaaatatgttgattacaaacccattcattacatagtataaggaattcacagtatattgactatatagtgtctaatgatcttgggcagatactgtcaaacttacaatatctatatagatgtaggtctttttaaatttacctagtcattcttctatcatgtatattgatgctgaaagaggaactggtcagctcctctggacaacaaattcttagtctataatattaggagacatcttctgttttgcaaatgtctgtgaatctgagcaacctggcattctgcttactggccagaaagctggcgggtgacatttgtaacatttcctctttgagactctgagttcacctagagaagtctaagcataacagctttctttcccagcacgagcctttatagctctctttagctcaaccactctgtccatccagccaatggatgtcccttcccctgtaccccaatttcaagcttattttaggaagccttgaactaccatgtatcctggctcctagctgagtttattagaggtatggagcagtgcaacttaaactcaagttgcacttacattttgaattttaaaatgatggttttatctgttgtgtgaagtggttcacccttgaggaccaggagcctccatatcctgactgaaaaccttttctgagacttagagtaacagtgcttttggttccttgagttctcctgtctccagataccaaatgaccttgacttttctgccttgtgaattcgtagtccaatcagctgaaattaaatcacttgggagggacgcatagaaggagctctaggaacacagtgccagtgcagaagtttctccaggtggcctccctttccaacaatgtacataataaagtgtatgcactttcactaat

SEQ ID NO: 16632 - DNA, 204 bp, Homo sapiens
gtgatcggggtgggatggccagaggaggggacagtgttggtggtgctgtgggcttgggtgttaaacctgggcccaacttccaagctttctgtttgctccctgtgtgatttggggcaagctacttcccctctgttacctgtaaaatgaaatgaagaatacctatcttaaaaggttcttgtaagaattaaatgagataacacatgt

SEQ ID NO: 16633 - DNA, 180 bp, Homo sapiens
agatgggtccgtggcccacactcggtcatgtgctcagacaacgactgatgaaaacgcccatgcggtttgcatcgactgatagtgtgttctttccgggatcacaaacattaacaaaaaagttaacttatgtgacttggcagttattctataccatttcctgtccattaaaatttttaaagg

SEQ ID NO: 16634 - DNA, 2181 bp, Homo sapiens
cgctgccggcacttccgcatctgcccgtgggcgccccacagctgcccctcagccgctgagatccagtgtccaagctgcggccaggagtccacccacctccgcatccacccccgtccgccatcctgcccaccaccaggtcggttcccgaggcctggcctttccctctcctgctgagaaccagaacccaccaggagcaccacagagtcctcctcttggaaggcagaactccctgaaatctggaatcagggtggaaacagcctgtttttcccatttaaacaggagtcctcttcaacttcagctgattacaataacaaaaggcggaattgaattgtgcgatgccaacggccttctcatttacaggtttttttcccccacattggcctttatttactacttccttggaaccatctctgaattctgaatagctgacaacccccaatgttatccactctgttgcttttgtctggaaaactctacagtgtttgtgggatgtccccaaaggaaagctatgttctaattttatcatttccatctgtctggttatgtcaagttaattcagaaagagaagagacagtgaccaaccctgagaggcctaatagggcagagatggaggcctgcccagactaggaggcagcggggatagacagggaatggggagaagaaagacccccattggtttggaaatcaaggagagggcggtgacatattggaccagaagaggcactagccattttaaggagaggaaagagaaaactctggggtcagggagagaccctacccccacctaattatccagcatatatgtaagaaacatagcagcgatggtattcgatctgtgccatgactcttctgaatgtttggacaggttagagttggggacccctgttggccacttgttgacctctcatagtggtgcttgggccaggtcttctcaatggaaggggaatcccttataggggagagggaacagagcccagtgaaatggcagtcagaatgttaaccctggatccatctctaagtagagagagggtgcccattgcctaggtgagtgtgccaagctcaggattccaactggtgcctctgagcttcccaatcaatacttcctggagccagccccacccacccctgagaacagaggtcagacacagctgcgtaacatccatcctgctacaactcttccaccccaaacaaaagggctcaggctacacacgaccatgatttatgttttcaggggatgcccatttgtcccaagcttatcctgtaattctagaattacctggtgtcctgatgcattttccactagaggttgctaatcagcatgttttagcccaagtccgccttcctgctgtggttaacctgttatgttgcttttggaaggagactctaagacagggaaagcaagttcatggtacatacgcagccattgtctctgtttttacccatggcagacattgctaatcaatggcagctctatttcactgagtctggataaggtttcagagttcaaatgcttgacgttggcacttaacatgaaagcctataggtcattcttgctctgggatctacaggcagggtaggcacaggtgcagcctaagaagggaacctgcttcctctcccttccaaagacagtgacagctgactgagggcaaagagcaggcaccactcagaacgtggtgagtacagctcagctcagcactcagtcagtggtaacttgtgcccagccctgtgctaggcgctgacattaacaggagcaaccagggcccaattcctggccttggagctcaaatctttcctttgatttttgctcctgatcatcaaggccccagtggcaaccatgtggtaagtggccaaccaagccctacccagggtcacccaacacactctgccttgagcctctcctcagggtctattccttgcgtggattatgtggccgtagcatgttacagttcaaacatgtctccactaccctgttaagagcagcctgggaacgtacaggccatcaagactatttatttaaatacaaaaaaaggggaaaacacacacacggaaaaaaaattgtaagcactttttttgtaaaaccaatgtctgttttgttacatacctttcatgtcgtgctttgtaaatgtcttatttgtgtaataaagttaatgcaagtagaagtgctggcactgaaatccagaa

SEQ ID NO: 16635 - DNA, 379 bp, Homo sapiens
tggttgtgaattactgtagcagcaaaagcaaattggtctccacacctaaaatcgtctgcctgtgtactttgtagatgtgaatggtactattcaacggagcacaatcacatgttagcatttggtaacataatgtttttggatgttcttatggatgtttcttccctaaactatgtatggaattgagcatcatccagaataaatagcgttgtatcccaaattgtgatttgaaccctgggatgctctaattggctggttggtttggatttgtaactccagaaacattctatagtgtgccagagcaaaaggcaaatacacaaaatattatttaaatcaggaaactaaaaatattaacatctattaaaaaattgagcatttttct

SEQ ID NO: 16636 - DNA, 1740 bp, Homo sapiens
actgatagtctagttgcatagatttctcattgtttgggttggaatacacgtcattgtttatttttgttcctttgtcttctggcttttcagctgttctttgtagtcccttttattatgcataaaataaagaaattcttagattaaatcagaatgctgaataaccttgtagctagcaataaggtgacttacagttgtataaacaggaagccaggcttttgaactgtttacttaagattctgtggtgtgacatctctgttattgtttccagtcaatatttacaaagcatcctaaagacagggtcttggaaattgtcttcagatgatcttagaggtctctgccaagtctgagagtataattctgtaggtattgtgttatttgcaacgtaaatagtgcattttcttaatcaaatgattgtaaattatatttacttgtaatcagttccatagctttagacggtggttagattttttttttccccaccagggtcttgtttaaaggggtgagccaccgcacccagtcctgaggggtggcctctgctgctggatttcatgtcttcctccagcatgactaagtctggaacagcaggaagggttgatgcttactgacctggtgatgttagaagacaagtagtttatggatttaaacattagagctggagtggggctggaaatctttgtaaaggaagttctttcagtaagatgcccctgcttgtctttgtctcttttttgtttaacaaggtaactttttgtttaacaaggtaactttttgtttaacctagattttttttaaaactttttttttttttcatattggaaaagtaattcatattcagtagaggaaaactgaccaaaacagaagcaaaaataagaaaattaaaataatctctaatcctactacctagaataaaacactattaatattttggtctgtttcctgccaaggtgttttctgtgtatacatggatattttgtttgtttttaaacaaaacgatgggatcattctgaacatactgttctatagtatggtcagctaataatatatcagacctttttttatattattaaatattctacaactttttaaaaatgtctattaatattccatcgtatagatgtgatataatttgcttgatggttgtctcttaaaaagaaagatagcaaatactttttttaaattacaaaagtgatagatgttcattgtagaaaatgtaataaacactgttaagacttaaaagccatataattccaccaaccaaaattaatcccttttgtcatatttctagtcatttttatagcctttttttctatgtatttataataattatcatttgcgtttttttcctttttttaactttaaaaatgtatattctagggtcaggggaaatgtaatctggaattaaatattagccttaaaattcacaattttgattttcctggcttttcaggaattgactaactgtaaaagagtcttgaaagtatttagtcaacaaacagagtgcattttttttttttttgactaagaaagctcgttgtagtagaaagggtggaatgtattgaaaattattagaagcagggaagtattgttagtctagcttatttcctttcagtcttttttcaatatttttataaacattgagtacttactgaatttagttctgtgctcttccttatttagtgttgtatcataaatactttgatgtttcaaacattctaaataaataattttcagtggcttcataat

SEQ ID NO: 16637 - DNA, 129 bp, Homo sapiens
gtgcattttggtgtgcctatctctgatggatgattgattgcttttaaaacttataacagaaataaaattgtaatcccagatttcttaaataattctttaactagatcatcgggatttttgtttttttga

SEQ ID NO: 16638 - DNA, 2742 bp, Homo sapiens
ttataatcacagacttgttatataaagtttgtattattctattacgcaagtctttctgtagagatgcagcatttgtaatatttcatccccccaatctttgtttcttatattttgtcggcttacacataatcattctttctgaacttctaacagttccaaagttatgggaggcacagtaaagctgatgggattctgtctcatctcataccttacatataagtctcagtagtatccctagagaaatagtgttcctctcttatatattcttgattctagtgacaaaggatccagcagtatttgcagattccgatttggagtctctaggtaattgatttaagtataaaatccaatcatataaaaactttaatgaattaggataacaagaagagaaaataaaggtaaaaacactattacctgtttctagtcactttagaacagatggcactaaaaaaatttttttttaactttttaccagctgttcttggattccaaactaaacaccaagatacttttcattttaaaatgtataaagtaacaattcagattcacttgggaatagcagaatttttttatacagggttaataatccttaaaatacttttatttccatgccttattagtatacatacttaagaaatggttcattgggcccgagtttcttgattttatttaatacaatcggatttaataattttgtggccagtaaaattataccattggcatgaagctgtgaaaaatgagaaattctacctttaccagggatatctgttctactgttttaaaagttcctctctattttattttttatttaacatgaagtaaaattgaaatttcttcttggtgtatagttctgtgaattttaacagaaagatttgtgcaccactactgcagtcggtacagaacagttccttcactcccaatagctctcttatgctgtccctttgtagtcagctccttctagctctaatcctggcaacagttctccgtcactattattttgccttttctggactgtcatataaacagaatcttatagtacgttccctcttgaaatgctttttcacccagcataatgactttgaggttcatccatgtcattttaaattttgaattggcaatatatattctagctgttactagatgagcaatttaaaaaggtgtagctattagtgttgtattttttcatttacattaatgtaatttccattcactatgtgttgataaaaatcttaaccatccctagagttttatatttccaaaaatatgccaaaaggaaaactatgactgtatgattattttagcgagagtcatatttgagatggtgttctgagccatagttctctaacatctccgtctacatataacacaaaacttttataaattattttaacaaagattaaaatatactgcagggcaaataatattctctaaaacacaggaactgcttttcgtaaagaagactgactagatgcatctttctttgaagctgttctagtcctcctctagttaacttagctttatgtagaatttctactgtatttaatttctattgaagcccttctgtattttaaaatgtaatatactttgtaccatttataaaaattgtgtgatgaatgaatcacatgttcgttgttataagtgttaacctttttttgacaattttgtgggaaagacattctccactgaattttaactttccttgagactttcaagaatgcaggtctcgtttgatgaaaaaaccgacttcataacccaatgttactagttagcgacattgtgctgaatttctccttgaactttttaactttatatgtaaaataactttgatcttggtcatttgaaagatcatttccaggtctaaaattccatgattttgtatttaattcttcctgagaacagaagaggggaaagcaagagaggacggttttgtgtctttatgaactttgttacttaagtactccattggagacataatttttctaattagtggatctttttccactggaaagtgtgatagctcattgctaatttttcattcatagttcattgcttccatttgacctaagattggccatttgttggtgtgaaaatattttcttttcagaaatagtttactagtgattgaagtacttttcttatttttgcttcctattataaaatggcgtggggggaagggggaaggatggagatgggaggagagggtaaaagaatagtactctgattttttaagaattagtatctactatcttggatatttgaaaaaaaattggttgaaactatgtttaagttttatgtgtgccttgtaagattgttgtaaaattttttgtgagcactttgagatttttgctgggggaggggtgttttgtgaaagtgatggttattatttatattatttattcctgttcagtagcacggaatgatctccaaacattcctaggagagtgtctgtttgcatgatatgtctaaaaattttcaggaaaatggaatctttttttaaagttcaggtatgacaaagtatagaatttattcatttaacatattcacatttagtttatgtttctgatatgacagaaaaatgaaaagtgtttgagttcagcctcttcatttactccatttacatataaaagatcttgaaaaggtagttgttacttcgttgtcagagaaaaacacttgccctttttcctgggatgtaactatcttacatgtttacataagaaataataaactggaggtgggaatgga

SEQ ID NO: 16639 - DNA, 509 bp, Homo sapiens
gtaggggcttcatgctcacaactcgaactgactgacaatgtggcaatagtcttagtctttttaggagtgattttgctagtttgacttctccaaagcctctgtgtaggtggtagggagtgagtcaaagcactaatagaccaggcaacttaccacttggagtggatttgccttacttttgccctctcccattttctgttttgagttatttatcttgtaaagtctgttttcctttcccaaggaataattccttttgtctacctaacattgacttatgtcttagactgacactgttttaggcttttcactaggcacattccgaaggtaccaacaagttaataacgtcacctactctccactaatagatgctatgctaagagaagtgaataatctttctttggtagaaaataggctgagatataaggtgatattgctattgacctgaaaatgtgatagaacttctggttgcctattgattattcctccatgtctgataaatgaatctgcttcct

SEQ ID NO: 16640 - DNA, 556 bp, Homo sapiens
caaatgacagaagctaattcctattgaacaacaatacagtacaacacagaatgttagagaaaaagcctttttatcctgctttctttgaacacatacttgatcaaaattatttgtaaagaacatctttcctactttttgattttaacaaatgcaaatttagttctctaaaacttgaaaaaaaaaaaagaaaccagttctgtgaaaacggtacctcatttctggaaaataacttataccagcccttctgttctagggaaataaaagtctagcagttcaaagtttaagttttaagagacgtatcagattatgtaaaattaaatttgtgaaggatgtatagagtctcaaacactgatcacaaataaactgctttgttgtaacacagagtactgcctggttcctgatgcagtcactgattcttagttgattgatatgtatttgccccagggcactttaatttgggctgtagttattttttttaatacaatagagacttttcatttaactttaactttgtaaatattgaagtgtgtaataaagccaataaaatatgggtttg

SEQ ID NO: 16641 - DNA, 1778 bp, Homo sapiens
gccgggccctgagggtgggggatgcaccgaggcccgagggtccgtccactgctgcggttccgaggctcccccgccactctctctctgcccaggttctgctggtgggaagggatgggacccctctctgctgccccctcctcccctccacactgcccatctctgatgtctggccctggggaatggcaccagttccagcctgggaatcaacccagttcctgagtgcccatcccaccccgcggttgcctctcctcggcacccttgattgggttttgcactaaagaggtcagctgggccaatgatattgctccagaccgagtcctacccaccttcccccggaagtgtcccaagaggctccgaaggcctcccctccgagcccagctctcctgtctcctccacagccaggccctgcacgcccacctcctcggacacaggtgacagggttaccctccagtttgagctcatctgcacgagacacaggtagcttggggttgaagttaggactcctcctgggctggaggatttacctggtggggcacttccagactgtttctagcaatatacacacacgttctttcctgtgtcttcaccccaaaacttcagttgattctgacctgggaggatctggggaccagggggtcttgggctgccttgtgatacacagccccagccaccctgcacgggggctgcgagcaccagcaactttgatttatagaaggaaaatggaaacccccatctgagtattttgggaggagcccccagccctcatccagctctggcacgctgatacctccaggtactcccctcactgtcaaagctggggctcagcctcttgtcatctggagctttgtgggcaaagctgagaagctgcaacccagatttcaacccaaaaaggtcaagctgaatgcctcagactgatgtggaaggcagctggccttcctgggttggaacgaggcagtggccctgagccccttctccagggccaggtagaaaggacaaacttggtctctgcctcggggaagcaggaggagggctagaagccagtccctccccacctgcccagagctccaggccagcacagaaattcctgaggccaacgtcaccaaagttagattgaatgtttattatctttctttttcctttttaccttattgatttgatgaatcttgaaatggattcatttccataaaccaagttaaagtatggcccgaccatttaagaaaacaaccatctgagacacgcaggaaattgtgagcatttcgacccgagctctcatttcctatttgtgaagggtcagacacagtctacccaggggtgtctgggggacaagggggtctctggagatgtcacccagggagccccctctatgtctgagaggctgccactgctgcacatgctcagtgaggcttggcggccatcctggcacatggctcttcctgggtcaaccgtgacctgtctggctcaggaatgggctctggctgctgggggagccgtgtcactcctgggccatgggggcacctcctgggcacttaggtgtttcagcatagattccagtttcgcaccctgggcagacccccaggccccatccgggatagggcagaggaggtgctggcggccccagggaaggagggtgtgtaccccaaggccccctggctgtgctgaggggctggggtgagcgctccatgttcacatgagcactgctgcctcttcacttgtgggactttttgcaaacccaaggatgaactttgtgtgcattcaataaaatcatcttggggaagagg

SEQ ID NO: 16642 - DNA, 219 bp, Homo sapiens
cttacgccgttgcttttccagactgggcagaggggctgacttcgcagtgtgtgccaaagagccggtgtctgataatcccattttcctgcttatcacctgaactgtgtcagtatcacttttagttttgttggttggttggtttgttgtttgtttaatatgccctgttttctacttctgttggaaaatatttggggttgaaataaaccagtgggagcatgg

SEQ ID NO: 16643 - DNA, 132 bp, Homo sapiens
atggcatcagtgggtggctggccgcggttctggaaggtggtgagcattgaggcccagtaagacactcatgtggctagtgtttgccgaatgaaactcaactcaataaaaaacaaaaaccaaattgggcagctg

SEQ ID NO: 16644 - DNA, 1521 bp, Homo sapiens
gcctgggccgggggcggggccgggactgggggcgggactgggggcggggcctgggcggggccgcagccacaccgctggctccgcatggttcattttctgatgcccaccgaggagccccagccccgtcccagaggccgctgcccctgagttctgacactgtgtgtttgggaaggtgggtgaggctgggcagggcctggcggaggtggagtggccactggcacttgcctgctgcttggagtgccccaaggaggtggctgttaaccacccgccccgccccctccctgctcccagctctctctcctggagtctgaagcctgcaggtccggggaggaggttcgggattccctggtgggcctcgacgtcccttggatcagaggtcatcccttcctcctctcctggaaacagacagggagaagttgagcaggtatcaactaggggaggagagagggtctccagtgttccccccatagagaccaggagggagagcctctgttttgtaaactaaggataaccgagtttgctaaattgagaggggctattgggccctagaggacactaggagactggttaggacaaaaagaccttctccctagcccttctaccccacctgacctctgcaagagggggcattgatacatcatcgggaaaaaactttgctccaggcatcactgattccctctcccacccaaggagaacgtttggtacaatcgacatcctagccccacccagaggtggccctcccaggctggtatttatctgcaaggttgtagtcaagaggtttttctccccgctttttgtttttaagcttctagacactccttgaaatgtgtgtgtgatggagggaaggggacagatttgaggactgaagctggggcttggggattgccactaagtacagctgacggtttctccccggacactcgcctactaagtacccttggggtggtgctgggtcattacttctgagccccagccccaatccagagaagcgctgttgcccgccctccacccactaggtgaacagcaggatgccctgttgggggcttcaggtctctgtgggtgggaatgcaagtgaacttgggagggggcacgggcctgtagatcagggatagcgctgttgatcccctctctgtggctccaacccgttgggtcccttgctgcaaacccatgaagctggccctcagctccctgaccccctgtcctaggtcatgaaggacactctgcagggtgaagcaccagggagaggcctcggctgtctcctgtccccggcggggtgcctgctgtccgtcccgctttcatgttactgttgcagcttgtgctgagcctgcccagttggaggagactgggcacccctgcctcctgcctcccgcctcccgccaccctgtctcagtacctcccctccccgccccctgaaacatgtgcccctgccaaggccggagacccacagccctgaaacgagaagtgcccttaaggatcaccccagcccccacagccctggaataaatttcgcaattagtttcc

SEQ ID NO: 16645 - DNA, 281 bp, Homo sapiens
cctgttccaggcgccctcctcaggccaaccacagcgtcttgggtgggcaggacaggctctggagggaaaagccagagagaccaagatggaggctgtggagcagcatttcccgttgcctccatagcaagaagagtttttgtttgtttgtctgtttttttaacctcatttttctatatatttatttcacgacagagttgaatgtatggccttcaacatgatgcacatgcttttgtgtgaatgcagccaatgcattttcttacagtttacagaatgtgaagatg

SEQ ID NO: 16646 - DNA, 39 bp, Homo sapiens
ggggcgcattgtcaataaagcacagctggctgagactgc

SEQ ID NO: 16647 - DNA, 2180 bp, Homo sapiens
aggggactacccaaggatggagctccgtgggttgacactttttctgtgaaaagaacactgacacaccagtctgggtgggtttttaatcactgtaactgcagtattttgtacaagtgtctaaacattgtttacaagactaaggcccacttccctgcaggctgacctgaacctcagggggtagctgatcctgtcattctggtcaccaaacaggagggtcctggcactacccagatttccacagtgctgctaatatcccagctccagccagcaccccatctgcacctgaatcctctaacttcacggtagcacttacagctgaagccatcagcatctggcaggcacacctgagtcaccatgtagcgctgctactggaggtagagacggccctttgagatggtgcccagcaggccaaacccacctgcctctgccaggaacagccaactccatgggaactctatgggagtggcttttaaaaattcagatgagttagaagctttttatcccttcctctcaagaaaatattctttcaccctgtctctcaaaccacctagaactttagaggatccatctttaagggtcggtgtggatgaatgagaaaatgcacctttctgacagtatctccactttacttaagaaaactagcaaatatatgaaaagacccttagtaccaaatacactcaattgcctttttaatgaatgtacttgtcttggataggttgctggtaaaccattttaaactattttttatagctgaagttcttcactactataaacatgtcttctgtactataaaatccatttaactggtgttcttaaaatcagagcgtccagaggaaattcttcctaaaactaggattcctgttcctttgtcttctcactcgcactctggcactgctccctctgaagtgcagtgggatctcgtgtgctttgtcttgattctgtgctgcgctgccgctgggcgatgcagaccacctgtcttctactgaaggacagtccgctgtctccagtgggggcagcagctgtcccccagcctcgatggagacactggggcagtctgccttgtctgtggagctgctctctctccctcatcccaccccaaatacttaaaatgacactacacccagacggcgcccagctggctgcagcacttgtagcatgcacatgactctggtagtaaccaacaaaaacttgttttatggattcctcgtttactgaggaaagggaacatgctggttctggaaaagccacaatattgaatctaaaaggaaaccgtttattgtttgatgaaagtttcactggttaaataaaaaactaaattaataactggagcctctaaatttattatccattatccagtgatggaaagttgtatttctcaatcatgcttagggccaaaataggtatataaaatgtgtcacagaaaaacacgcatttgcaacgttaacctaacgaaatttccatgaagaaccaagtcagggcagcatctccttagtcccagctcaggctctctgccttccagaggccgcttctccagtgactaacctcctcctctggctcctccttgcagacagttatcccttgtttagaacacgaatttccatttacctggtgggaacacgaaacaggagtctcttctgttctgcaagtttgatgggtaagaggtagccttttttcaaagtaggatttcctttttcaactgttccaggaaagaatctctaagactgggtagctcacagccagccaaaggcagctacatttccacagaagcccatccgctgcctccgtggcttctccagccattgaactggtcccacacgcaccccaggccccactcctcggcagtttcaggtgtagctgtggggcccgttcctaggtctgtactcactttagggaggcttcactgactaggctttcctcctgcatgttgaatttccttcagctttaagaggaagagtggaataaatattctaagtgatttaatgcactttgacttgtataaaactttctgtgttagcgacggtatctatagccctttatacgagcgatggatcttgagctctccttccatgttgtaaatagggattgtattcttgaaaactgctgtagcaaattcatctgtggtgcaatacactttttgattaaagctcttcaatccagatgcaactacaatggattttact

SEQ ID NO: 16648 - DNA, 19 bp, Homo sapiens
aacaaaaaccctgttgtcg

SEQ ID NO: 16649 - DNA, 543 bp, Homo sapiens
ggccttcgcccatcctgctgacccatttttctgccctcttcttaccccaattttcttgtattaccctctacaatatactttttattgagcactttgctgctgaaatgctgcctcttgcctttttttttttaaattttaaattatctaaatttattgtttgttgtggtgtctatagcaaagtttttctatcaattttcccccatcccatccccaccctggactcatttgagaagacttgagaaatgtcttaatactcacactgctgcatgtagctcttgcttatttactggtctgggaaacaggatgtgtttcctttttttaaaagccaattgacagattacacctaaatactcctccttttgtatcattcagccttttgttttagtttggtaagttttaagaaatttcagcagcaaagttgttattcagtgggcacgatggactccaaatgcctcaagttatgtatacctgtcccagatgtaaacttcattgtcctttgttggatgatattttaaatggatataaaataaattggtctaaagg

SEQ ID NO: 16650 - DNA, 1737 bp, Homo sapiens
acactgatctgctagtgctgtaatattgtaaatactggactcaggaacttttgttaggaaaaaattgaaagaacttaagtctcgaatgtaattggaatcttcacctcagagtggagttgaaactgctatagcctaagcggctgtttactgcttttcattagcagttgctcacatgtctttgggtgggggggagaagaagaattggccatcttaaaaagcgggtaaaaaacctgggttagggtgtgtgttcaccttcaaaatgttctatttaacaactgggtcatgtgcatctggtgtaggaagttttttctaccataagtgacaccaataaatgtttgttatttacactggtctaatgtttgtgagaagcttctaattagatcaattacttattttaggaaatttaagactagatactcgtgtgtggggtgaggggagggagtatttggtatgttgggataaggaaacacttctatttaatgcttccagggatttttttttttttttttaaccctcctgggcccaagtgatccttccacctcagtctcccagctaattgagaccacaggcttgttaccaccatgctcggcttttgcattaatctaagaaaaggggagagaagttaatccacatctttactcaggcaaggggcatttcacagtgcccaagagtggggttttcttgaacatacttggtttcctatttccccttatctttctaaaactgcctttctggtggctttttttaaaattattactaatgatgcttttatagctgcttggattctctgagaaatgatggggagtgagtgatcactggtattaactttatacacttggatttcatttgtaactttaggatgtaaaggtatattgtgaaccctagctgtgtcagaatctccatccctgaaatttctcattagtggtactggggtgggatcttggatggtgacattgaaactacactaaatcccctcactatgaatgggttgttaaaggcaatggtttgtgtcaaaactggtttaggattacttagattgtgttcctgaagaaaagagtccaggtaaatggtatgatcaataaaggacaggctggtgctaacataaaatccaatattgtaatcctagcactttgggaggccaaggcgggtggatcacaaggtcaagagatagagaccatctttgccaacatggtgaaactccatctctactgaaaatacaaaaattagctgggcgtggtagtgcaagctgaaggctgaggcaggagaatcactcgaacccgggaggcagaggttgcagtgagccgagatcacaccactgtactccagcccggcactccagcctggcgacaagagtgagactccacctcaaaaaaaaaaaaaagaatccaatactgcccaaggataggtattttatagatgggcaactggctgaaaggttaattctctagggctagtagaactggatcccaacaccaaactcttaattagacctaggcctcagctgcactgcccgaaaagcatttgggcagaccctgagcagaatactggtctcaggccaagcccaatacagccattaaagatgacctacagtgctgtgtaccctggggcaatagggttaaatggtagttagcaactagggctagtcttcccttacctcaaaggctctcactaccgtggaccacctagtctgtaactctttctgaggagctgttactgaatattaaaaagatagacttc

SEQ ID NO: 16651 - DNA, 1492 bp, Homo sapiens
cactggcctccagcctcaatctgttccgtagctcagagcctgcctgccagggccaagtgccctagagtccacccggtgtcctgaagtcctcggggggaggccagcccctggctcactggcacagggcaggtgggctctcggggaaggtgtcgggggccccctaggagggagcgctggggacattgccatgggacggaagtctgcttggcagtggctttgataagcgatgcttgggggtcagaccaccccctagaggagccacgtgccgcccagccaccttcaatgcctgccaccctgcccgaggatgtacagagccgtgcccacacatttccttgcaacttgatcaaatttcttaaagcaaacaacaaaaatgtacatttctgtttttccttttaataaacaggtgtactctttatcatggttggtatgatggaccattctttggggcggaggattgattatgttactctctttaaaatctgttcccatattgaacaggcagattggaaaagctatggttcgatttctcagaagaaatgtttaggtcttagtcaatagttttaactatgccatttgtttaaatgagtgcatttgcttcgagggtagtgtcttactaaaagttaggaacagagacctagtggtgtgtccaaggccgtgtcactttccccttcagcacaccccagcttctgacctcagagcccaggagctgcgtggacagtgtggggtgccaggaggaggggcggtggctggtcctcaggcacgctgcactcccagccagacatggtctttccgtttcttaagtagcaagtgtaggtttcagctggcagttccacctgcatgttctctgcttcgctgccttggaaggggccacattccccattcctcttctccttacagcgcctgcctcctttttcaagcaggcggaaagctgctgtttctcacgtttcagggagaggggtgagcggagggagacctgtgtccgtgccgtccggctccctgggtgggaacaggcaagggatcagatgcccctgacaccacgcctctggccacaccagatgcctctgcagtcctcgacagcctcttcagtgtccctcctgcggtgatgtccttactgtccccagccagggccggggaccggtgtttcactgaggacctgcattagaaacattttttaaattgttgtacaggaagagatgtgtctaaaacagcatcttaaagctgagtgtatttctttgcacaaggggtcatgctgatgaattcttctttcattctgatctttgttcagccaacaggagcgtccttttctaatgtcttccattcctaccccccacccaaaaacaaaagaaatatttgtagcttgctatctgtatttgaatttttagcaattttatatttagatactttgaaaaatgtaaatgactaatttggtcattaaatcttgtgacatattcgatattaaaatgatattaaaataaaagtcatataaatacac

SEQ ID NO: 16652 - DNA, 281 bp, Homo sapiens
attcactaatttcactggctgtcaaggctgtgttaaggaaaatgggtttgaactgctgtgggttttgagtactggactggatgtcagaaacctttgccatcacgggaaattctgtcactctggatttactgtctgttccccacagctaaattcctctgcagtgtgatttagcaccctggatccccatcaaccagttttggcatttatttgaatgcattaccccactggtttccataaactattttacaattgtttaaaataaatgactgtttatttccaca

SEQ ID NO: 16653 - DNA, 1590 bp, Homo sapiens
gccagctccccctcctgacctctcgtggccattgccaggagcccaccctggtcacgctggccacagcacaaagaacaactcctcaccagttcatcctgaggctgggaggaccgggatgctggattctgttttccgaagtcactgcagcggatgatggaactgaatcgatacggtgttttctgtccctcctactttccttcacaccagacagcccctcatgtctccaggacaggacaggactacagacaactctttctttaaataaattaagtctctacaataaaaacacaactgcaaagtaccttcataatatacatgtgtatgagcctcccttgtgcacgtatgtgtataccacatatatatgcatttagatatacatcacatgtgatatatctagatccatatataggtttgccttagatacctaaatacacatatattcagttctcagatgttgaagctgtcaccagcagctttgctcttaggagaaaagcatttcattagtgttgtattacttgagtctaagggtagatcacagactgtgtggtctcaactgaaaggatcacccttggcatctgtgtgcctggattcttccagaatgtctacaatgctaatctctcacatagaggttcccagcttcttaagaaccccttttggcacctaatcaaatttcaaaatccctccccccacattttcatacttttccccattctcaggacttttcaccatccatcacccacttatcccttcatttgacaccattcattaagtgccttctgtgtgtcagtccctggccactcactgcagttcaaggccccctttccgctctgctgtactcctcgcctacctactccttgccttttctgtcgcacagccccttctttccaggcgagattcctcagcttctgagtaggaaacactccgggctccaggtttctggttgggaagggaaggccaggccaaaagctccaccggccgtatagataatgtactcgcagttttgtatcttccattcatactttaacctacaggtcatttgagtcttcacacaaataataacctatctggccaggagaattatctcagaacagaagtcatcagatcatcagagcccccagatggctacagaccagagattccacgctctcaggctgactagagtccgcatctcatctccaaactacacttccctggagaacaagtgccacaaaaatgaaaacaggccacttctcaggagttgaataatcaggggtcaccggaccccttggttgatgcactgcagcatggtggctttctgagtcctgttggccaccaagtgtcagcctcagcactcccgggactattgccaagaaggggcaagggatgagtcaagaaggtgagacccttcccggtgggcacgtgggccaggctgtgtgagatgttggatgtttggtactgtccatgtctgggtgtgtgcctattacctcagcatttctcacaaagtgtaccatgtagcatgttttgtgtatataaaagggagggtttttttaaaaatatattcccagattatccttgtaatgacacgaatctgcaataaaagccatcagtgct

SEQ ID NO: 16654 - DNA, 45 bp, Homo sapiens
gcacaaaggaaaacatttcaataaaggatcatttgacaactggtg

SEQ ID NO: 16655 - DNA, 1505 bp, Homo sapiens
gccagtgggtccctgactgctgcacatggcacaggccgttcccttccggacccaggcaggctcagctctggggagggcaccctggtctgtgccttgtgggtggaggcggggcagggctgtgtggcaccgccagggagcgggcccacctgagtcactttattgggttcagtcaacactttcttgctccctgttttctcttctgtgggatgatctcagatgcaggggctggttttggggttttcctgcttgtgccaagggctggacactgctggggggctggaaagcccctcccttcctgtccttctgtggcctccatcccctcatgggtgctgccatccttcctggagagagggaggtgaaagctggtgtgagcccagtgggttcccgcccactcacccaggagctggctgggccaggaccgggagagggagcactgctgccctcctggccctgctccttccgcagttaggggtggaccgagcctcgctttccccactgttctggagggaaggggaaggagggggtcttcaggctggagccaggctgggggtgctgggtggagagatgagatttagggggtgcctcatggggtgggcaggcctggggtgaaatgagaaaggcccagaacgtgcaggtctgcggaggggaagtgtcctgagtgaaggaggggacccccatcctgggggatgctgggagtgagtgagtgagatggctgagtgagggttatggggagcctgaggttttatgggcctgtgtatccccttctcccggccccagcctgcctccctcctgcccgcctggcccacaggtctccctctggtccctgtccctctggtggttggggatggagcggcagcaaggggtgtaatggggctgggttctgtcttctacaggccaccccgaggtcctcagtggttgcctggggagccggacggggctcctgaggggtacaggttgggtgggccctccctgagggtctggggtcaggctttggcctctgctgcctctcagtcaccaagtcacctccctctgaaaatccagtcccttctttggatgtccttgtgagtcactctgggcctggctgtcgtccctcctcagcttcttgttcctgggacaagggtcaagccaggatgggcccaggcctgggatcccccaccccaggacccccaggccccctcccctgctgctttgcggggggcagggcagaaatggactccttttgggtccccgaggtggggtcccctcccagccctgcatcctccgtgccctagacctgctccccagaggaggggccttgacccacaggacgtgtggtggcgcctggcactcagggacccccagctgccgcagccctggtctctggcgcatctcttccctcttgtcccgaagatctgcgcctctagtgccttttgaggggttcccatcatccctccctgatattgtattgaaaatattatgcacactgttcatgcttctactaatcaataaacgctttatttaaagcc

SEQ ID NO: 16656 - DNA, 151 bp, Homo sapiens
cactagtggccatggctgcctgcctgactgtagtgcccaccaacccagccactgccacagagctgccacgccagccttggtatctactttttatacaaatctcctctagactgttccaggctgcctgcggattaaagtgggggtgactgtg

SEQ ID NO: 16657 - DNA, 1692 bp, Homo sapiens
tttccctttggacattctcagcaaattctgggctcagtctttttgatcgccacttctttgtggaagccctgccaggtcaagaagttttccctcttttgtggtgaggaggacacaggcctgggaaaaataggaacagagttcttgtcctttagtcccagctctcagaatcctcgctgtgtttcctcaggcagcatggctccgcctctctgagcctctgtctctgcttctgaacagcggggccaataatgatgccccgatgccttcctggaagttcagtgagggaaagtcagttgagggacacaaaagtgttttgtaaactataaagtacgtggcatgtgtaggtgaattacaggggccatggatgtggacaccatggagggggaagtggagcgttttcagtggagttggctcctccccgcactgagccatgttcctatgtcaggtggcagcggggaagcgagggtccaatcctgccctgcgctagtcctcatctgagtctcagcctgggtcccccatggttttagcaacacgggtggcaagcagatcaaccaggtggcattggaggcgtggcgcagccggcgggaccgcgaggagatcctcctgcaggagctggagccggtcatctcccgcgcggtgctggacaacccgcaccgtgagtctggctcagcagccccctcccgggcagcttcaccccacacccaggggccaggctctcccggggtctcatgctttgcccactgacccggcagttctgagcctggctttggcactcccagctttgtgactttgggtgagccttacagcccctgagtcctacacccagaaggcggctgagggaactgaggccagcatttttcctcctgcccctgggggtttggggccggcttctcccctcttgtgaagcacaaagtcccctccccacctacccttcctgcagatggcttctcaaactcgggcatcatggaagagcgcctcctagacgcagtggtgcccttcctcccgctccagcggcaccacgtccggcactgcgtgctcaacgagctggcccagctgggcctggagccaagggatgaggttgtccaggctgtgctggacagcaccaccttcttccctgaagacgagcagctcttctcctccaacggctgcaagaccgtggcctcccgaatcgccttcttcctctgactctctgagtggtgtcctcggcccccctgatggccaggccatgcaggaaaggccaggggcctctgtcacaggaacccagagcaccaagtgagatgaacggagtgtcggctaggccacgggacagatggccaggaagggccctggcctctaaactggctcgagagcatcttggccccggccaccttccccagggaaacccctggtcaccccagaacctcactgagccttgacctccccctgcagcctgagccttcttactgtgaattataactcagggactgtggctcgtggcggtgctccctcctcagtctgccacccttgccccttgcctccttggtcgggcaccatacctcctcccctccaccccacaccctgtgtccatatcaagccaggtggagccttctcagtttccagaaatggagggactcaagctgccacttgggcctggttttagatgtttttaattttgtaaaagaaaacaagtataataaactcagctgtgggaccaga

SEQ ID NO: 16658 - DNA, 428 bp, Homo sapiens
accccagggacatttcccctctgcagctgcggacagcgtcaggggcagaggggcacacaactttccccagagcaccccaaggacactgtgatcaacccgagaatgttctgggttcaactcaagcatctcccttgcacctccagggtcctgcgtggactctgggttccatcccacctgctacatgctcaccaggtctccattgaggaagaacaggaacgccggttcccccaccagcttttgctgctccccttcctgctggggttccctgttttcgagccatgggaggcaggctgctcacgcctcctcactctctgtctgtccctcaccaacaccaaggcctccatctcactgtaaataagtctctgttctgtaaatagatgtacagaagccatgttatttctttcatataataaacttttatgactctt

SEQ ID NO: 16659 - DNA, 900 bp, Homo sapiens
gcatgccgggcccctccatccacccgggggagcccagtgaagcctctgagggattgaggggccctggccaggaccctgacctccgcccctgcccccgctcccgctcccaggttcccccagcaagcgggagcccgtggtggcggtggctgccccggcctcctcggagagcagcagcaccaaccacagcatcgggagcacccagagcaccccctgctccaccagcagcatggcatagccccggccccccgcgctcgcccagcaggagagactgagcagccgccagctgggagcactggtgtgaactcaccctgggagccagtcctccactcgacccagaatggagcctgctctccgcgcctacccttcccgcctccctctcagaggcctgctgccagtgcagccactggcttggaacaccttggggtccctccaccccacagaaccttcaacccagtgggtctgggatatggctgcccaggagacagaccacttgccacgctgttgtaaaaacccaagtccctgtcatttgaacctggatccagcactggtgaactgagctgggcaggaagggagaacttgaaacagattcaggccagcccagccaggccaacagcacctccccgctgggaagagaagagggcccagcccagagccacctggatctatccctgcggcctccacacctgaacttgcctaactaactggcaggggagacaggagcctagcggagcccagcctgggagcccagagggtggcaagaacagtgggcgttgggagcctagctcctgccacatggagccccctctgccggtcgggcagccagcagagggggagtagccaagctgcttgtcctgggcctgcccctgtgtattcaccaccaataaatcagaccatgaaacc

SEQ ID NO: 16660 - DNA, 1528 bp, Homo sapiens
caacgctggagccgcttccccagctcagagccccgccccaccccgtcctgattcgaggtcctcctggcctgagcgcagcgcctccaccctgccctgctgagcacagacggaggaagccgcttatcctgttttcatggacagctgagcactaaaggaatttctaaggacatttggttttactgctttttctctgcttccagttggagttgattcatgtgcttgtgcctacctggccgcaagtccccagcccctcaaccctccgttcctcctcagcctccctttgccagccacccctcctctagctctggtgggaggcccggggcccttcctcgcacagggcatgcctggcctgaggacccggcgctgagtggcggggcccctgctccgaggggctcatgttcaggcagaaccggtcccagcctgggctcctctgcatcttgctctgtggccttggccctgacccccatcgctctgagcatatgttccatgcctggcccttgccggggcctggactgcacaggcagcaaggtcatggtctgagtggggcttcctgggcagttggggcggcccacgccagctggcccagtgggtagtgaattggcttccttgacgcgagaggctctgagggtctgaaaagggcatctcaatggcatgggtgggtggggagtcagtcatgtcactgaaattgaatgggggaggcccaatgaggtggctcatgcctgtaatcccagcactttgggaagctgaggcaggaggatcccctgaggtcaggagttcgagagcagcctggccaacatggcaaaaccccttatttactaaaaatacaaaaattagccgggcatggtggcatgtgcctgtattcccagctactcatgaggctgaggcaggagaatggcgtgaacccgggaggtggagcttgcaatgagccaagattgcgccactgcactccagcctgggtgacagagcaagactccgtctcaaaaaaaaaaaaaaaaaaaaagaaattgaattgggggagtcatggtcaggggtgagacctgaaggacctccccctgtgtggccctggacacagcccaccctctgtgagccgtttccaattctaaaacagactcaatgtccccctcacccccacctcaaggtcaggatgagaacacactgagtgaggagtggacgctgtccattgccacggccatgagggctggagaccagaacagcatggcccgaagcgtgcggggccccggatgacttggggacaccccagaatcccctggggagaacccttcctgcgcgctttcattttttgacctcatcactgagaaaggctcaatttggtgctcacgtgtccttaacacctgatctggcccaagctgggctccctttaagccaagagagcctcttgtggaccccgcctgcccgaatgaaatccgaacagttggggctgttcatggcaagtggggctggtttttcatttccattggttatttaaagtttcctttaaaataaacgattttaagttataaaaggtgaa

SEQ ID NO: 16661 - DNA, 1277 bp, Homo sapiens
gccacccagcctgtgggacctcaggagggtcagaggagaagcagcctccgcccagccgctaggccagggaccatcttctggccaatcaaggcttgctggagtgtctcccagccaatcagggccttgaggaggatgtatcctccagccaatcagggcctggggaatctgttggcgaatcagggatttgggagtctatgcggttaatcaggggtgtctttcttgtgcagtcagggtctgcgcacagtcaatcagggtagagggggtatttctgagtcaatctgaggctaaggacatgtcctttcccatgaggccttggttcagagccccaggaatggaccccccaatcactccccactctcctgggataatggggtcctgtcccaaggagctgggaacttggtgttgccccctcaatttccagcaccagaaagagagattgtgtgggggtagaagctgtctggaggcccggccagagaatttgtggggttgtggaggttgtgggggcggtggggaggtcccagaggtgggaggccggcatccaggtcttggctctgccctgagaccttggacaaacccttccccctctctgggcacccttctgcccacaccagtttccagtgcggagtctgagaccctttccacctcccctacaagtgccctcgggtctgtcctccccgtctggaccctcccagccactatcccttgctggaaggctcagctctttggggggtctggggtgacctccccacctcctggaaaactttagggtatttttgcgcaaactccttcagggttgggggactctgaaggaaacgggacaaaaccttaagctgttttcttagcccctcagccagctgccattagcttggctcttaaagggccaggcctccttttctgccctctagcagggaggttttccaactgttggaggcgcctttggggctgcccctttgtctggagtcactgggggcttccgagggtctccctcgaccctctgtcgtcctgggatggctgtcgggagctgtatcacctgggttctgtcccctggctctgtatcaggcactttattaaagctgggcctcagtggggtgtgtttgtctcctgctcttctggagcctggaaggaaagggcttcaggaggaggctgtgaggctggagggaccagatggaggaggccagcagctagccattgcacactggggtgatgggtgggggcggtgactgccccagacttggttttgtaatgatttgtacaggaataaacacacctacgctccg

SEQ ID NO: 16662 - DNA, 505 bp, Homo sapiens
cttccgtcgtcctgccagtcgccatgccgttgcgaggcctccgggatgtcccatcccaagccatcacactccacaaaaacatttaatttatggatcctgcctcctgccacgtgctgggtggacctaaggttccttcccgccccattctggcgacacttggagccatctcaggcctcatgacttgaaggggagtggaggggggagccgtgtctcccccctccactccctgagtaattcacggcatttgggggctcaccccacctccaggtctgtcaagtggcctttgtccctggggctgatggcccccaactcaccagcatcatgaccttgtgccagtcctggtcctccctccccagccgctcctaccaccttttggtgccacacttctcaggctggccgccctggttggggcagccgagagcctggggttcattggtgaaggggccttggagttgtgactgccggggccgtatcaggaacgtacgggtaaacgtgtgttttctgg

SEQ ID NO: 16663 - DNA, 316 bp, Homo sapiens
cgggcgcccggccccactctccggatctggacgatgggctcacgccaggaacgccggttcccccgggcccgggcatctcgcctgcgcttcctcctgatggtcgccagagggcagcatcccctaactaataccgtaaccgcgcagtcccgtttgacggtggtgccgtgcccagcatcgtgccaaggactcccctactttagctcatttaatcctcaaaaaatgctattattctctttttacagaccatgaaatggaggctcagggggtgaagggactgatcaagatcattcagcaataaatgctggaaccaggactc

SEQ ID NO: 16664 - DNA, 619 bp, Homo sapiens
aggtcccgcagggatgaggctgccagccccttctctgcttcccctccagcacagggaccaagtgggggagcctgcagaacctgtccaggcacagtggctcctcaagcctgcctgtcctgcagagtccccatggcatggagcttacacctgactgactggagccccctccccgactcccacttccagaagctaggagggagggatacctggaagactccggtcacctccttcttgctcagggcctaaaagatgctggtcctcccaacctcactctcagactccctgccaccttttcccctgggttctgccgtcttgcctcacttcccctcctgtcacatgctgacgttggacttagcaggttctaaggccacatgtgtgacctctctgacttctcttcctccaccaaggcagctttccttaccctgacacagccccagaccccacaaagccttctggacctggaaagcctggggaaggactgacagaccccaggaccagccctggggctcagggcagccaccccgggccgctgaccgactgacctctcctcacggaggcccagccccaaagccccagggctggcccgtttgggacagctgaccaataaacactgatggtg

SEQ ID NO: 16665 - DNA, 2610 bp, Homo sapiens
ggagcaggtgtccgggctggagaagagtcctgctttctctggagtccagacctgtatcattccatgaggaactttccccttcagatcacctctgcgccacatctcatccatgcctcctccatgcactccagtccacactccccgtagcatcattccattgcccctcccatccatgctgggaccctcctggcccaccaaggcccaggcaccactgtgaatattctcctctgaaccactagagggcaggccaggcaggccaggcgggcccgtgcagcttgtgggcaagaaggagctggcaaggaccggcgctgctggagactgacccagccctctggctgaggacatgcagcggctcctaaatgtagagatgcctgtggctgagggggcctctctacctgtgtccccactcactccaggagcactggctttggtcacgtcttagcagcagggccttgctccgttgttcccttgccctggtggtgggggggccagaccacctccggaatcctgccacctgtgactgtctgactgcttagtgcttcagctgtcccttccttgtgtcctgggggacctgctggcggcctcttcctgggagccatgacctcagaccccacccacactccagatcgagacccctgcctccccccggcaaatgtcctcccgctgccttgcagcctgcactttgcacatgctcacccccagcacagtcccactggcccctcacctccccttccctgagctccttcccaaggactcctggtcactgcctgctgtgcagtcagaggcccagggtccagcagcccggcgggaacgggtgctgcctcttcctccagttagctccagctcaggtctgagacccgtgctgagaaaggtctgagcaccgaccgtgccctctgcccagggctgggtcctgagcagctggttttcctgcaggaaggttggagcaagcaaagtccttctctgccctcagggtcagctgcccagactggggcggatgccagagaggcaggtgggctgtggctggactggtccggagctggcttccttaccagaaaagcctcagccttcctctggaagcatcccccgttctgggcaagggggaagggctcctttaaggggtgtgctttcccagtggggagcagtctggccctgccccctactaaagcctctgctctcagcactttcccccaagtccttgtaacttgcttgaaggtgggttctggctgccagccagtccctggacaaactctcctgccccttttaaatttcactcattttgtataaacccagcaggctggtgtttacttagccctgtagcttttttcattttttctttccgtctttcttcttgagttcacggttcaatattgcctcctcgccctggtgaggggaggtgctgcttttctgccccacctgccggctggttccagcagcgctggggcccagctggggggccgggatgggggcttctctctctgggaggggtgcaggtgccctccccaggctgggagggttccttccctagctccccatctgcccccgctggtgagagttgggcttcttggtcttggaactccctggcattgggaacagagcatttccagcatttgttgttgttttactcacctaacccttagaaaatgaatgttagaaggtgcctgccgaggcgggacagagtgttcgctcgcgctggagaaggctctgctcagccctgagagtcccttcctgccccaccgatactggcactttaaaaaggaagctgaccgcacagtgtccagacgaattggcccccagaagatggggagttctgtcctgcccttctgtgtctgcgtgacctcacccagcctaggagggaggtgcattcagggtagatttgcctctcattcaaagttctggggctttgggtggaaaacagccagctttggcgctgttggggagactcctccagaccaggaaccccagaaggagacagagcctgccacatcctcccacgccaggccctgggccagggtgattggactgagaatttggccacaaccaaattgatgctggctggaaccagaggccagaaagcctggccttgtccccatgtgggagccctgtcctcagccctcttgtccccttgagctcagtgaattcccaccaggtgcccacagctcctggacttcaaattctatatattgagagagttggagagtatatcagagatatttttggaaaggagttggtctatgcaatgtcagtttggaatcttcttgaaagtttaatgtttttattaggagatttaaagaaaataaaggtctacaatatctttaggttttttttttttcctgtttaccgcacaaactgaccacatggcatgtctatcaggatggagggtgtccatgttctcctctgtctttagggaggtgataaggagatgggcggaggggtgtttttttctttgactcccctcctttctaacagaatgttgccaccactgcttgagtgggctgtgtttgttcctctgtcccagcttctgttgtagaaaataacattgttaggggaactcaggctagtgtcagcgtcttggtttggggagaaaaaattaaatgtttcggtttttgtttc

SEQ ID NO: 16666 - DNA, 2187 bp, Homo sapiens
gggcaggggtcaggccagccttctgccatgatgggatgaaaactccatggacttgtaagtgggtcctgtgattggccttggccttagaccggccacgtgcacagctccctctttaataaacgcttaggggttgcactgtttttgagaagaggaatttgttgggctcctgggacccaaactcatactccccctacttgagctgccttgctaagatccagaagattggttagcagggggtcacgtgtgcatgtgatgggacatgtgttgtcatgaccccgggcttgtgacatgacccagccttggtcttggacaactgtaaggaacaacacaacgggctgtcactgggggccgtcacccagcctgggtctctactgagctgcccaaccccaggtgccatcctttcgagtagggtaatgtcactgatgctggcagttgagcaataatatcttcctcctttgggaggtagtgtgactgaggaggaaaccccacccttttctcctcactgtgcctcagttctcaggggactccaatgactgttgtgctctcccccgaccccaccccaggcacagcgcaggcccttgttaggtagtgtgctgggacgcctccgtaatacatgcagtgtgcagccagtctggctcaggaatgctgtgtatggtggggacggtttggccactctctggttttcaacagcatctctgggcagccctttggtggtttgtccctagagcttttgactcaggtcaagctttggatgctgtaaatttttgagaaagccaactagtgtggaagcttgctgccccactgcagtgggtctgagtgacctgttggctttgtgcggaggcttgcatccagccagttgtatttattctgtgtgtgaacccctcctaggaaggcctccaggaaggctgccctgtggccacacccatcctcctttcctctctgctgactccacatttccaaaattcagtgcaaaaaaagccctgctgagcatcacatgctggactcttcccctgccacaccgctcagtgccttctgttctcttgagactccctctgagtagctgagtgaatccaaagccataattgaccctgaacgtaggaggaggaaaaggcgaagctgacctaagaagtgggaccctggccgggcgaggtggctcaagtctgtaatcccagcgctttgggaggccgaggcgggtggatcacgaggtcaagagatcaagaccatcctggccaacatgatgaaaccccgtctctactaaaaacacaaaaattagctgggcgtggtggcacacgcctgtagtcccagctacccgggaggctgaggcaggagaatcgcttgaacccaggaggcggagattgcagtgagccgagattgcaccgctgcactccagcctggcgacagagcgagactctgtctcaaaaaaaaaacaaagaaaaaaccaaaaaaacaaatgggaccctttggattctatgctcagggaagagcaggcagagccttggagtgctgaaggaggtgctgttccctgttccatctttacactttctcttctgagatgtctgtaaggattttacccagatgccatttgtctgtttcattttcagactcaccatcaattaccaaggcccttgcatctccccagatcgtttcccaagtttggcgatttgctgtcggtgcctcagccacatatgaccaatggttacaactcagggctccagacctcagctaaaaagagaagacgctgccctcctgggcacgaacgtttagaatgctcaactcctctattgtgaccacaggaaggtggccctgaagatgcaccgaagacagctgggaggtgactgctgtactgtcagcctctctgtggaggcattcgtgcagtgccagctaaaagggaggtgaagggggatatcggacccagcgagggagttgctggtagaaggaaagctcttctcagtgtggctggattaagagcagcctagcagcttgggcacctccactctgtgcggtctgatggccccagcaaggtcgctgcagggacttcctgaggacttggtttggtttttttctggggttggaaatctgagccaatattgtgtctgttccatttgggtatgaagaggaagtctggatcacttaaactgactagttatttccgggtcataattttaaattaaagacatatcacttttt

SEQ ID NO: 16667 - DNA, 451 bp, Homo sapiens
atgtccccgcgcagagcagagggaaggcagcggaagacgccagctgccagggcctggggccactgggccagcgcctggcgatactggttgggggcaggatcattctgccccttgtccacgcacccccaccagccctctcgcttctaacacagggcacctgctggggctcagggatgttagggacgagttccagccctgccactgccctggggcgacccctccctgtccctgcctccctgctctgccgcccctcttcctggaccctcagtggctgtcccatggctacatcctgtgggtgggggccctcgacaggacagcaggacggtttgttttcagtggaatcccatccctgggttcccctggttcccactcttcccaagcctcccgggactgggacatgtttgcaataaaggaaaggtttgtggcgcctgtcatggcaggcatctcatgg

SEQ ID NO: 16668 - DNA, 131 bp, Homo sapiens
tagagggacctccctgtccctggcctgcctgggtccagatctgctaatgctttttaggagtctgcctggaaactttgacatggttcatgtttttactcaaaatccaataaaacaaggtagtttggctgtgc

SEQ ID NO: 16669 - DNA, 1238 bp, Homo sapiens
aagccggctactgtcagcaaagcctgaagaagtggggctggataccctgcccccaccatatccctaccatcccttctcagtcaaccctttacccttacagtagcaagcatagacccctgtctaacgggggtagacaggtgcagatgaggtgaagatcactgtcatctaaaagctggccactaaattaaaaaaaaattaaaagttatgggattaaaaaaagttatgggataaaaaaggttatgggtaacttatggtataaaagttatgaaaaaaggccaggtgcagtggctcacgcctgtaatcccagcacttttgggaggctgaggttgggagttcaagaccagcctggtcaacatggtgaaactgtgtctctactaaaaatacaaaaattagccaggcatggtggcacgtgcctgtaatcccagctactcgggaggctgaggcaggagaatcgcttgaacctgggaggtggaggttgcagtgggctgagatcacgccattgcactccagcctgggcgacagagtgagactctgtctcaaaaaaaaaaaaaattatgaaaaaagttatgggattaaagaaagtcaggataaaaattttaaaaagcaggccactgtcagcaaagcctggagaagtggggccggaggctccgcccccatcatgtgcctgccaccccttcccagtcatccctttactcttacagtagcaaataagacccctgtctaatggggggagacaaatgtgtagacccttagccaccttggccagggctgactccttaaatttctggatgatgatgattgttatttaatagccagaggctcatataattggcctctttggaagaggcctcatggcctccttactctcaccaaagcaatttttccctcaggggggctcccatcttcttacacagagaggcagctgaggcaggacagtggggctaactgtagaccaggcgagggcacgggctgctggggtggccctgcttccccagtgtacatattgtatctgtgtaacattttgtatattccaggggtagggccgccccctgtatcatacctagcagaggttggagctggcacatggggaggaggttctaataattatttggggctgggaaacttatttattgatagcataggacagaggaaggaggcggggatggggtcgtggcgccctggtgatgcgactcctgtttattttgctttttatttcggaataaatggatttagccata

SEQ ID NO: 16670 - DNA, 433 bp, Homo sapiens
atgcccaggcagctcctggggcagtggatggataaatagaagaactgctatgagctggacctgatagctgtgcagaaagtgagagcaggggcaccttttctacgtaagacacaaaactcaagctgtaacagaaaggtcaatggacttgacccaactgagaaggaaaaacttctgtatggaggaaaagacagtaaacatgacagactgatagaaagtattggcagaccaggcgtggtggcgggcacttgtaatcccagctactcccaaggctgaggcaggagaattgcttgagcccaggagtttaaggttgtagtgcgctagacggcgcctgtgaatagccactgcactctagtctggggaacatatgagacccctgccatctcaaaaaaaaaaaaattctcaataaactatgtgcccacgaaaattaaaaatt

SEQ ID NO: 16671 - DNA, 83 bp, Homo sapiens
ggggtcccgggaggcgggtgcaagccttcgctgtgccgagccttgtgtttctgacgcaagccaaatgaagaaaagcaaagctt

SEQ ID NO: 16672 - DNA, 305 bp, Homo sapiens
ggttgctggaggccgggctaccgtcttgtgcctgaaaaccacggggcctgtccccagctggggtgagcgctcagagggcctggggccctcactcctgcccacgcctcccagaccccagaacggagcttcaagtcagacagatccctgccttggtgggcagttctgccttccaaggaagaaggggaagaaaaggacctgtgggtggctcaggcccaagcagaccccgggctccaccccagccccgcccaggctgctgccagtgcacacttttacaaatttaatataaagcaagtccagtcttaaaa

SEQ ID NO: 16673 - DNA, 1547 bp, Homo sapiens
aggcctccgtccccatggccgccaccgctctggaccacaggcggggaggaagcatgctcaagcagcccagcgggcgggccccttccgagggagcctcccacggagtgaagagacatgggggacttttgcacaaccgacgcttttccttaatgttagtgagatatatatatattatatatatatattttttttttggttaggaagtgtgaagttttgtgtgtatgatttctgtgcaaaaacaaaagcaacactcctgagtccttgcagcttccttggccattctcaaacccactcagccttcatcgctgacacacacactcctaccccaaccagactaaatgcctataacgctgtgagtgtccagtccttgtccaggaaactcagatcccggcctggcttcctttcatgagaggagcaggccttggacagcgtatcgagcatcctgacccactgcccctgcctgagaacgccatctcggctcccgggcacagctgatggggtttggggattagaacttaccccactgggtctcccaaaagccttggtgctcccggctgtgggccatctggggcaggaaagtgagccattcctaggctgaggtccaggcagccctgcccctgaagaccctctaggagcagggcacccagtggccctgctgctgtccagccaggcctgcctgaggccacgctgctatggaggctgcctcctagtctcccaccaggtcccaggctgtggaaagccccagcccagggatggtcagaactcaggggcagattccactgccccttctgccaaacacatccagaacctgccctcagccctggaagctagcatcttctggggccaggggcttgcttcctcgctccatagccctcaactgcccaggcgctcccaccagcagaactgagcctgcctcctcctcccagcctgccccgctgcccagaggaccccacgcctctcagaggcagaggtcccatgacagcctttgacccacaacggccacacagccgcctccagaccagcactcggactgccctgcagtggccgcttgggcctccctggcggtcccgccctgccctaggctttaccttggaagcctgagaggcgccggctctcttgctcctccatcgatggacactgcattgcttctcatcggacacttgtggagcgcaggggcctggggagcagcgctaaccctggaggcagcctttgggtgatggctttttcttcccttttcctcccgcgggcctgttttcaggtgttcctagcatttctgcctccaggcaggacggcaggggtgagcagctttgggagagacacctggcctttttctcctggagcctctccctcccggccctgggaagtgggcgcagccctgtgttcccccagcttggcagatgggctgcatgcggcgctcccttccttcccacgctcagcggccccggccagaccctggcagacttcacacctcattgctttaccccctggggcctggggaaatgtctgtactttgggaagtcacagaaatacatttttgtgcaaaatgg

SEQ ID NO: 16674 - DNA, 698 bp, Homo sapiens
aagttctaaggggccgaggacatcagtgaagcagcagtgaaaccaggggctctgcaggtcacttgggacggacgccaccagacttgtctccaaaaatcaccacctttaatactccccggcctgcacacacccacagtctcactgggctccaccctcacttactgcccgccgtgatggccttgaggctgcctgcccgcgccaggatgtttggcacaaagagcagccccgaagcccgctcaatgctctcgatgggcaccaggaagcgctccagtgggatggcctcatccacaggtgcgttgggcatcacgtaggtgcggagctcaatttgcccacctgctgcctccaggatcagcaccttgaagaagtgtgtgggcactgccacgtggttcttgccgatgacctggtactttacgtaggatttcccatcagcctctgtcctgtgggcagacccaggcacacgtgggcagggggcctggatgaacccaaagccacctcttccaggcagccttccctgatctgtcctctaacttctgtcaacctgcaggaccacgccctcactgtgagacttctgtagcctgcctggctcctccttgaggctggaactctctccagggtggttaactctttccctctgttttccttatgcccaacactgggtcaggcagagtgggcgacaataaacgctgctaggagaatcg

SEQ ID NO: 16675 - DNA, 470 bp, Homo sapiens
ccctgaagtcacgccttggccctgacatccccacatgcccgcagagatcctctttgagtgtctgtctttgtccaggtttcagacatttctaggttggggaagatgctattgggaaacctcttctccgtgacacagaatgttctgggtgggagccgcccttcttcatcttagagaaccaagtgcctcctgtctgaaaggtgagggtggcctgacctgggcctctccctgcccctccataggtgggtttgtagggtcttgtgttgcttctggtctctccaggcttggctgagacggacggtagacttccaccatgtaccgatcacatcccagctctgcatggcccctgctaaggctcaggtataacctcaccttccctggctcatcttggccttggggagttgcctttaggcttgagtcctcaagcctctccttttcgtccataataaaatgtttaagttattaagatcctt

SEQ ID NO: 16676 - DNA, 156 bp, Homo sapiens
ctgttacagtgcagcagcagtgacggaggaaacagacatggggagggtgaacagtccccacagcagacagctacttgggcatgaagagccaaggtgtgaaaagcagatttgatttttcagttgattcagatttaaaataaaaagcaaagctctcct

SEQ ID NO: 16677 - DNA, 649 bp, Homo sapiens
gcaggtgcccccatcccccccgcattctggcctaggcaggagaggatgggcgcagccctgccacttaacttgtttgttggtgacacagttgttcagagtggggagaattcaccccattctgtccctgcccctagtcacctagctgtgagggtgcctgaggctgaatggctccacccctcccccagccctgcttctgacctgtggctctggagcccctgcccctgcctgcatccccgagcaccccaccctccaggctccactaaggagggaggggctgtctgcagcagctgcactcagcacctaggccagggtggggccgccgcagatgggctcaggaagccccaggtgcactcagcgagagccctgcctttcagttgccaaaagctgcatcaggggaatgcggcaaggcacacagggctctggcagcccctggggactgggcgctgcccctgggaggggagagcctggccagggctggtgttgggcccggagcagcatcttccggtgctatcctcccctcccacccctcacagctcaagccaagtccagcggccgcagtcttcacctctccacactcactttttatctggtgtttttacttctgcctgcgtttgctctctagccaataaaccgtccttgtgtgcgagtc

SEQ ID NO: 16678 - DNA, 601 bp, Homo sapiens
gcccctaggactcaggcctgccaatgccacagccaagcccaccctgggatgggccacccaccagggctcagctccttggttccctcttccttggttccctcttccctggtccccccaaatctactgagccacggaccgcatcctccagggggcctgcaggccccagccaagtgccttccgtgggtcatcccagcacctgccagggcccgacctggggctgagtgcagaggctgagcaggacgttaggcccgggcccctggcacgtcctccaccggtgcctcctctggggaagggaaccagccctccagagcaggagactggcaagagctctttgtctcaccagctcagccccggccactccctgccaactccatgaccaggccaccatctgtaccctgcttcccaaactcccaggacctggagacaggattgtctggggccgaggggccagggtgtgaggtttcacctccgttgcggctgtgctcctgtggataacattgctagcgagccgcctctggttccactcagcttggttcctgcccccgccctgctgtatgatattaatgtggaaggtcatcaataaaggggaattgtgttggtg

SEQ ID NO: 16679 - DNA, 1286 bp, Homo sapiens
ggacccccgagggcacagggacccggggccccgcggggctggggccagacaaagactcggcaaaggggcgagaggagggaacgagcgggcgccgggccactcggggctgagctgggggcgagcgggggcaggcggctgatgttttataaattgtaaaataaaaaaaaaagaaatctaaaatcttggactttatttttgcagagagaaaaagcgcctatttaagtatgctttgtgtttctcctactcctttttttctttttattgtagtgattgcagtggtgtttagcgaggagcctaccacgtgagggagggctgctgcccggaggaggtgccgggcagccgggggcgaggcagggcgccctggccgccggggcgcgccgggggcgcagctcaggagggcgccggacctgggaagccgattccaatcagttgtcagacccgggaagcccgacgttccgctctcccgagtccctctgtggggtgaggaatgggtcttgtgaaattctgagcaaaaacaaaggcaaactctatctccgaaagggacgtttgggtcacatttcctctctgggggcggactccaaagttctcaaaatgagaaggcagaaatgaaaacacttcaactttttttttcttttcttcccggggcgggtgtcttgaacccctcttctccccgcccctctggctccgttctcctcccctcctccacccgtctcccggactcgggggtggcgcctgacaccccgacactctcggacactgggtaaggggtggggggcgggcacggcggactacatttcccatcatgcctagcactgcggtcctcactaaacaaaaaaggaagtcaattccttcacctggatccccggcggccccgggggagggaggggccgggaccgccgactgcgttggagactttgcactaagttcctggtcagctgtggtgtttgtgtgtgtgcttctaagttgcactgccttggttcagccttcggttgcatttcatgaaaccagcattgttcgagcctgtgagaaccccgtcctgtgtcttcagctcgatagatttgtttaatttaaaagccttttgttgtaaaaaggtggggttcgtctgcagcccctctggttctctgccatcagcaccgtgtggactccaaaacgagttgccaatccttcctttctcggcccttttccctcattaccctgtatttttgtgcatactgaattgtatatcaccgggtaaaactgttcagattgtttaaatttataatcttaataaaaagtcgattacagaa

SEQ ID NO: 16680 - DNA, 122 bp, Homo sapiens
acactcgcgaacccaaggccaggggcacacatgggccaggcaatgaggagcgtccttccttgccccacaaataaaggcacatcccaggtggctgggacctgccagtaggtgtcacaccacaa

SEQ ID NO: 16681 - DNA, 3749 bp, Homo sapiens
tcaaccgcttctgcttccaagtcacacggctgctgctggcacacggggccgaccccagcgagtgcccagcccacgagtccctcacccacatctgcctgaagagctttaaactgcacttccctctcctgcgcttcctcctggagtccggagccgcctacaactgctccctgcacggtgcgtcctgctggtctggctttcacatcatctttgagaggctctgttcccacccaggctgcacggaagacgagagccatgcggacctcctgcgcaaagctgagactgtcctggatctcatggtgaccaactctcagaaactccagctgcccgaaaacttcgatatccaccctgtgggcagcctggcggaaaagatccaggccctccacttctccttgaggcagctggagagctatcccccgcccctcaagcacctgtgccgtgtggccatccggctctaccttcagccgtggcctgtggatgtgaaggtcaaagccctgcctctgcccgacaggctgaagtggtacctccttagcgagcacagtggctccgtggaagatgacatctgataggtctcaggctacaggaacgggggacacgggcagctcaggtcagcctgttggtagatgctgggacagcattagaagagggtctttttgatctgggagatgagacgggatccttcatgagaaaagccagccaggtagagcctgaagctgtgatcactccagtggtgaagggtgcagctctggttcttccagagagactgcccccttccctccagcggcactccaagtcccccccatgttggaaagaggaacagggcttggattgatgtttataccctctgaattggagggcagtgccagggcatttgcagaagctgggaaggaccaagcctcagcaccccagggctgcggggctcttgttggccgcacgtggcagtgcagctggagaggaagcctggggcacgtcctgtgcggtgccaccaaggccccacccctgccccttttccttccaggttctgttactcacagaagtgtttctggtgggctctgcgggagaagacactaagggccccacaggcttgtttcatggtgttgcaagccaagctggcccctgcctgttcctgtagctctggggccaggtcagccgtggccccacctaccagaactgtgctctgctggcagctgtgcttttgccaaacccagggcctcagcgaccatgacttctgctaaaaagcaatcatgagtgcgtggctggggacagacctctctgaagtgtctcctgttgtgaggggctcactttggagccactgaagagccgactgtgccacccacttgcgagcctcagtcccttccaagctgcactggtcattgggaattgtgtaaacacctctggggataagctgaggtgactaaatgatatatttatattataagattaaactgactttcttggccttaacaaggtccttatataaaatttccaccccgcccctccatagttcaggatagaggctcccacagcagccggtaaggaagtgggtggcaggtgtgaggggatgctgtgtttggggggttgtttccaagtccctgcaaagaagcaccactctagactggcaagggcctccacagtgtggaggtcccattttattatttttttttttcgagacactctgtcacccaggctggagtgcaatggtgcaatctcggctcactgcgacctctgcctcccaggttcaagcagttctcctgcctcagcctcctgagtagctggcattataggtgcccaccaccatgcctggctgatttttgtatttttagtagagacggggtttcgccatgttggtcaggctggtctcaaactcctgacctcaggtgattcgcctgcctcggcctttcaaagtgctgggattacagacatgagccactgtgcccggcccccattttattttagttttattttgagacagagtctcgctctgtcacctaggctggagtgcagtggcgcaatctcacctcactgcaagctctgcctcccgggctcaccccattctcctgcctcagcctcctgagtagctgggactacaggcgcccgccatcacgcctggctaattttttttttttttgtattttaagtagagacggggtttcacctgttagccaggatggtctcaatctcctgacctcgtgatctgcccgcctcggcctcccaaagtgctgggattacaggcgtgagccaccgcgcccagccccattttattttttactttaaatgcctgccaaggagcagcctcaagcccagagaagactgaggctacggggaacttcccttgctgcaggctgttgtaacactttaagggccccaggtctccactgccaagcaggacttggcacatgagcacccaccccacagcaccatcaggcagcacccatgggctccaccagcccagctctgtccctcccctaggtaaagatcacactgaagtcttcaagtccccagcaaccaagttgggggtggtttccttcctcttcaggcagccaggcccatggctggaaggccgggctggaggcccagggaatcggttactgatgtggccaccctattcccacatggggagcaccaggagccctggagccccttccacccaatcccatctcgcaggagagcagggtctgggctcctgcctcaccgctggttcagcagcaccctccccgccgggtcccaccttgccttttgaagaagagcccgcataatgagtggacggcagacagctatatttagtggtgcctcgacactcacgaaccgccagcgtggcgcctggatcttgcccagctgccagctccccccaccaggactgtggttcctcagtttctcctgccagccccggctcatctcagggcaaagctatagacatggtagatctcatcggggaggttctcctgcctctcctcggccaggaggctgaggcctgcactgcagatgatcctgcggaccacgtcaaggtcccggcacacgctgctgtccacgtcgtccagaatcacgccctcctgggccatgttgtctttgatgacgatgatgccgttggggcggaggctgcccttgcagcgccgcaggaactcggccaggtgctgatcggtgaggtggcctggggagggcagaggcaaggttaccagggcaccatgcaagcggatgtcggcactggatgggatgtacttctcagccccgctgagcccctcatttgtgcccagcattttgtgtgcacacatggcctcattggctctcagtcccgagagatttactaaaccccaattcatagaataggaaactgtggctcagaggtcatctacctaaagacacattaagccagaatttgacttgacgggatggcttacaagtcctgcctgatacctacacaccatgatgccccacccctgccaggcttggatcggaggagtgaacctgggctaagagtttggcattgcaggagctcccagagagactgccttccctacactagaagtccccacaaaggcttctgagaccacaaaatacaaggccagacctagagtgtccacagcaggcctgtgctgcccgcctcaggaggtggccgactgctgctagcggcctgccgccacgtcagcagcccagggcacagcgctcgaggtgtgctgttaggctaagagggtgcagggctagacacgaagcttaaactattcatcttattaaaaataaaacccttataaaactcc

SEQ ID NO: 16682 - DNA, 1278 bp, Homo sapiens
ccagcagctgatgcctccttggccaccagaccatgggccaagagccgccgtggctatacctggggacttgatgttccttccagattgtggtgggccctgagtcctggtttcctggcagcctgctgcgcgtgtgggtctctgggcacagtgggcctgtgtgtgtgcccgtgtgtgtgtatgtgtgtgtgtatgtttcttagccccttggattcctgcacgaagtggctgatgggaaccatttcaagacagattgtgaagattgatagaaaatccttcagctaaagtaacagagcatcaaaaacatcactccctctccctccctaacagtgaaaagagagaagggagactctatttaagattcccaaacctaatgatcatctgaatcccgggctaagaatgcagacttttcagactgaccccagaaattctggcccagccaatctagaggcaagcctggccatctgtatttttttttttccaagacagagtcttgctctgttgcccaagctggagtgaagtggtacaatctggctcactgcagcctccgcctcccgggttcaagcgattctcccgcctcagcctcctgagtagctgggattacaggcgcgtatcaccatacccagctaatttttgtatttttagtagagacgggttcaccatgttgcccaggagggtctcgaactcctggcctcaagtgatccaccggcctcggcctcccaaagtgctgggatgacaggcatgaatcactgtgctcagccaccatctggagttttaaaaggctcccatgtgagtccctgtgatggccaggccaggggacccctgccagttctctgtggaagcaaggctggggtcttgggttcctgtatggtggaagctgggtgagccaaggacagggctggctcctctgcccccgctgacgcttcccttgccgttggctttggatgtctttgctgcagtcttctctctggctcaggtgtgggtgggaggggcccacaggaagctcagccttctcctcccaaggtttgagtccctccaaagggcagtgggtggaggaccgggagctttgggtgaccagccactcaaaggaactttctggtcccttcagtatcttcaaggtttggaaactgcaaatgtccccttgatggggaatccgtgtgtgtgtgtgtgtgtgtgtgtgtgtgtgtgtgtgtgtgtgtgtgttttctcctagacccgtgacctgagatgtgtgatttttagtcattaaatggaagtgtctgccagctgggcccagcacct

SEQ ID NO: 16683 - DNA, 1029 bp, Homo sapiens
cagtcatgattggcagccggagtcactgcctggagttggaaaagaaacaacactcagtccttccacacttccacccccagctcctttccctggaagaggaatccagtgaatgttcctgtttgatgtgacaggaattctccctggcattgtttccaccccctggtgcctgcaggccacccagggaccacgggcgaggacgtgaagcctcccgaacacgcacagaaggaaggagccagctcccagcccactcatcgcagggctcatgattttttacaaattatgttttaattccaagtgtttctgtttcaaggaaggatgaataagttttattgaaaatgtggtaactttatttaaaatgatttttaacattatgagagactgctcagattctaagttgttggccttgtgtgtgtgtttttttttaagttctcatcattattacatagactgtgatgtatctttactggaaatgagcccaagcacacatgcatggcatttgttccacaggagggcatccctggggatgtggctggagcatgagccagctctgtcccaggatggtcccagcggatgctgccaggggcagtgaagtgtttaggtgaaggacaagtaggtaagaggacgccttcaggcaccacagataagcctgaaacagcctctccaagggttttcaccttagcaacaatgggagctgtgggagtgattttggccacactgtcaacatttgttagaaccagtcttttgaaagaaaagtatttccaacttgtcacttgccagtcactccgttttgcaaaaggtggcccttcactgtccattccaaatagcccacacgtgctctctgctggattctaaattatgtgaattttgccatattaaatcttcctcatttatactattatttgttacgttcaatcagaatccccgaaacctcctataaagcttagctgccccttctgaggatgctgagaacggtgtctttctttataaatgcaaatggctaccgttttacaataaaattttgcatgtgcc

SEQ ID NO: 16684 - DNA, 875 bp, Homo sapiens
gttgtgcagagtgggatgtaaatatcgccttcctctccctatatccctcccatgaaaaatggcttcctggccgggcgtggtggctcctgcctgtaatcccagcactttgggaggccgaggtgggcggatcacctgaggtcgggagtttgagaccagcctgaccaacatggagaaacccagtctctactgaaaatacagaaaagttagccaggcgtggtggcacatgcctgtaatcccagctgctcaggaggctgaggcaggagaattgcttgaacccaagaggcggaggttgtggtgagccgagattgcacctttgtactccagcctgggcaacgagcaaaaaactctgtctcaaaaaaaaaaaaaaaaaaaaaaaagaaaaagaaaaatggcttccaggacagagcatgctcatttgctggcggacagttccagaaacagaccctgttagtccttctacttacctgctggatttttcaagcactaaatttataactttttgaaacaaaataatgtgtaattttccatttgggggcaaactctattcttgtgagcattattaaatcttgtttgtaaatatattgtctttctcttaatatttgctctgggtcaggaagaagctgttcacggtgtgataatactctttagattgtgctttcattattatagatgcatcatgtcttctgctttcacgtgtctgggatggggtcagaaatgcatcctccagctgacagaaaaatccaggatgagatcagaaggatactggtgttttctgacttttacaaaattacttgtttgttttcattaaaaaaaaagcataaactatgtttcttattactattagaattattaaatttcaaaatgaatccaacctt

SEQ ID NO: 16685 - DNA, 3352 bp, Homo sapiens
aggggagtgcctgcgagcctcgggtgagccttcctggaggagcctccgtctgcttgttcccacaggcctccagcgccctgccctgtggacagcccacccctccgcagccccatccctgcggggcggtctctctctctctccagcatgctccctgcggccctgccctcccgcccagcccgggccacctcgtgggggacaagtctcgccagcgcccacccccatggctcgggtcagtcctcatcgctccccctccccaccccgcgcaggccactgagacggtgggacacacgcccctacctgctccttcctgggccctcagtccacccgggctcgtcctggcagcccttccgcgcttcacacagtgccttttgtgaaagtgtcatcacgggtcccctgaggagacaaggcaggtccagcgcacatcaggcggactgagcactcgatgtcatccgtgtcgatgtcatccgtgtgtcccagactgtctgctgtagaaaacacttcctcctctcctgagtctgtgaagtcctcagtggtcctttttggattctaggcttgcacctcatactaaacattgaccctttcactatgccctcaacctgggagcatctggcaggcaggggggcaggtacacacacacccacaggcacacccaccagtacacacgcgtgcgcatacacacattttggtttgacgccctgttttcagtggcctggggaggtccacactggaagtcgaattccagctcgccttgttgactcgcctgtgtccaccggccatgaggagcccacgcctgtcctccccatcactttcctgtccctgagaactgtagatcatgcgcttgtgagcgaggccctcccctctgcaccagctcattgcaaagcgaacatcctctcctttccaggagccccaggattagcatctgaaaagggtagcacttccttttttgttgttgttttttttttttttttgagacgggagtctcgctctattgttcagactggagtgcagtggcatgatctcggctcactacaacctccacctcctgggttccagcgattctcctgcctcagcctcccaaatagctgtgattacaggcgtgcaccaccacgcccggctaatgtttgtatttttagtagagacagggtttcaccgtgttggtcaggctggtctcaaactcctgacctcaggtgatccgcccgcctcagcctcccaaagtgctgagattacaggtgtgagctaccgcaccccgccgaggttagcactttcatcaccaaagaccccgtgcctctcgtggtcctttgagggatcccgccgccaccacccttgtattttatcacgtgctcttcagggcatgtggaattcgttgagtttgcttttagagccaagtttctttccctgtgtgggtttttgaggaaaacctgaggtcccctaatctgtggccaccaccccccccccccgccacgccttagagcagagcagcccctcctctcatttggtgcagaaacagtcaagaggaaccattggcctagagctcctgtgaccgagagcgccacggaagcctggggatgacgtcgggcagctttattctttgcttggctttggtaactaggtggtcccctcaagcatcctcagttcctcttgctgtttatgaatctaagacaaggaagtcctatagaagccaaagggacagggacggaaaggacaggtcccaagggatggggctgtctttacttgtggaaaccaggaaattgctcctctcagccaaccaaggttgaccacacaccacccttccggagcagctcagtcagccctcggggacgagaaaccacaagcgcagagacgctgaggcccaggcaggtgaagaggaagtggctttgggtttttaaagtaggtgagcgtgagcctctctgactgcttcttccccgggggggactgcaaaccgctcagggttgcggcagagccatggacttccggtccctgcaacgggtgacctaagcgtggtgcacccatcagtcacgcaggaggactgacttgacagacgaaagacaagcccggatgacacagggtgagaagagtcagggccgcacctctgtccctgcaaaccaacaggtgcatggtgagtgtggcagtccccacagctccacaatgggctcccccgccaacggggacgacagggatcttcaggaacttctgacctcaccaagtcaagtggaccactctccactccacgaggatgtgaaacggttctttaaaatgggattttagagcctcgggaatgcatgtgcgtcacatctttcatattatgggtcaggatagattcatttcttgcaacatagtggaaaagatataagctgcagtaatttgctctttgaatgaccgtcacccccagtataggatatgcttgtatccccccgtcactcctccgcctgttttttaaacttttccaccacctgcgtccaaaaagaatgttatagcgagtgctcttaaatgttgaacctgggtgttgcttccgggccagtctgcgtggctccatgaaaagctcactgctgccccagccgggcttcttagaggaggtcagttgtcctatgtatcatcatttactctgggaatcctactgtgaaatcatgtctgtatttttctggagcagttcacatagagtagaatgtggaatttcccgtgaacgtctccttcctcccccgtatctgccgcctgtcacttcgccaccgtgctagaatactgttgtgttgtaagatgactaattttaaaagaacctgccctgaaaagttcttagaaacgcagtgaaagggaggaacttgtcctttacccagtttttcctttgtaggatgggaaagtataaaaaggcacagaaggttgtcatgggctgttccttgggggtttttatcctgctcaccgtggagataagcctgcggcttgtctaaccagcgcagcgcaaaggtctcgatgccttttggtaacatccgtcattgcagaagaaagtttacacgacgtcaaaaagtgacgttcatgctaagtgtttttccagaaatattggtttcatgtttcttattggctctgcctcctgtgcttatatcatccaaaaactttttaaaaaggtccagaattctattttaacctgatgttgagcacctttaaaatgttcgtatgtgtgttgcactaattctaaactttggaggcattttgctgtgtgaggccgatcgccactgtaaaggtcctagagttgcctgtttgtctctggagatggaattaaaccaaataaagagcttccactggaggcttgtattgaccttgtaactatatgttaatctcgtgttaaaataaaatataacttgtg

SEQ ID NO: 16686 - DNA, 1549 bp, Homo sapiens
actggtgcaccttgtccttggccctgctggtccctgtcgccccatccccgaccccacctcactctttcgtgaatgttctccacccacctgtgcctggcggacccactctccagtagggaggggccgggccatccctgacacgaagctccctgggccggtgaagtcacacatcgccttctcgccgtccccaccccctccatttggcagctcactgatctcttgcctctgctgatgggggctggcaaacttgacgaccccaactcctgcctgcccccactgtgactccggtgctgtttgccgtcccctggccaggatggtggagtctgccccaggcaccctctgccctgcccggccaaatacccggcattatggggacagagagcagggggcagacagcacccctggagtcctcctagcagatcgtggggaacgtcaggtctctctgaggtcaggtctgaggccagtatcctccagccctcccaatgccaacccccaccccgtttccctggtgcccagagaacccacctctcccccaagggcctcagcctggctgtgggctgggtggccccatcctaccaggccctgaggtcaggatggggagctgctgcctttggggacccacgctccaaggctgagaccagttccctggaggccacccaccctgtgccccggcaggcctggggtctgcagtcctcttacctgctgtgcccacctgctctctgtctcaaatgaggcccaacccatcccccacccagctcccggccgtcctcctacctggggcagctggggctgccatcccatttctcctgcctctggaaggtgggtggggccctgcaccgtggggctggactgcgctaatgggaagctcttggttttctgggctggggcctaggcagggctgggatgaggcttgtacaacccccaccaccaatttcccagggactccagggtcctgaggcctcccaggagggccttgggggtgatgaccccttccctgaggtggctgtctccatgaggaggccaacccttgccattgaccgtggccacctggacccaggccaggcccggcccggcgagtggtcaagggacagggaccacctcaccgggcaaatggggtcggggggactggggcaccagaccaggcaccacctggacactttcttgttgaatcctcccaacacccagcacgctgtcatccccactccttgtgtgcacacatgcagaggtgagacccgcaggctcccaggaccagcagccacaagggcagggctggagccgggtcctcagctgtctgctcagcagccctggacccgcgtgcgttacgtcaggcccagatgcagggcggcttttccaaggcctcctgatggggggcctccgaaagggctggagtcagccttggggagctgcctagcagcctctcctcgggcaggaggggaggtggcttcctccaaaggacacccgatggcaggtgcctagggggtgtggggttccgttctcccttcccctcccactgaagtttgtgcttaaaaaacaataaatttgacttggc

SEQ ID NO: 16687 - DNA, 2743 bp, Homo sapiens
cagccaggaccacccgctaggttagactcacaaataataataccgctgaaaacaaaactcagactcactcttcagtcattcagcaagatacaaccattctaccctctccagcgggcggatctcactgtgctgatgcccccgggaaggcctccccggctctcggcacctgcttcctttcagggagaggggagatctaagcaggacagacagaccccacgtgcgccctcagggtgacctctggtctccttgcctctcctttttctcagtttcagtcgctcacttgtaacagattccctgaaacactgctttttccgttttttaaaaaaactcctcttttgggggctcaggggcaggaggagggggagctgattaggagggaagctccagcccccgatcaaagagacagatccacactgctgccgatttgtggcgctggccggccttccccccaggtccctccgccctctgtcatgcggccttatgtagacttgctttgccaaacttttgccttaagctgaattgaaaggaagaaaaccaatcggagaaagaaagcaggatctcttttctaccggacttttcctcttctgccagaggtggagggagggttggggtcgcccgcgagagtctcttgagcccttcttcccggttgtcttgggagaagggtgaggatgggcatttagacccgaaaccagctgctcactctttctttttggcagaaataaaaccacaggtagattctgcctgaacagccccttctctccctccacccccaggtcgtatccctgcacctgcggagaggggctgtgagctctggcggggggtggctccaccagtcgcctggcctcttctcccctctcttcccagcagccttaacttcccttgggcggctctaggaggagagaggcaggctcctgtgagcccagggaattttcaccctctcagtcctcaggacccacccccagttgagtccctggcccttcctccaggtgtgtggctttttccttctccatccacactggtcccaaatgcctgggggccggccacctggaccgccgacacacagcctcaatgttagtctcaaaggtaaggaaggcattcacgtcccttcttgcagggcattttaagacttgaatcgggtgggccccggcccctgtggctggctggcccctggtgtactgtaaaagggccaagacagggctcgttctcaggggcgcccctcccaggccctcagggcagcgggacggtgcagtcaggctctgggtgccacagtgatggaggtggaaggcacccaagctctagggaagtcttgggaggcagtcggccgagcccctgcttcctgtcctcaaataagtgaatccaggccaagggctgggagggctgggtgggcttatcgtcgagagggttcagagccactctggaggctgggctggcacagtggagagcaacaggtgaggacagacgtctggaagcccatccctgggacctgccctccctcggtcccaggtcactggagctccagggcttacttagtcctgacccattgtgccagggttctgagcagtgtcggccttgtggccacttgcaggggctattaggggacatcccgctgaagccacgctccttccagcttgccaaacccacagctacccgcccgggacccacactcagcctaataattatcaagcacagaaaaccgtccatttagaaaaataatccatttctgctgcagatgagccacttgtaagagtctccgtgacagcgtgggacggtgtgggaaccaaagtccctgccctgctcctttgtccacgggctattgcgtttattcaaggggtgcttaatgaccgtttagccactgccgtcggtctccgggcccagctcgtgccaggaggctgtcctgggacacactgggctggagctgccggctggcacggtgctcagggggcccctgatgggggccaggacctccccgcagaaactgcaggttctcttgtgaggatggaggccgtgccaccccgaaaggcagtagccttaggggaacagtgggtcccagctgcatgtctgaggatgggtggggacagggctgggactcagctttcattcactggagacttctccactcaggtctttgttgcactaaagcagggacaggaccctgggggttcaggaagcgggtctcaggccgctggtttattcctggaggtggggctggagaccagaatggaaaggggcttcctgagctgctagggggtgaaggacccccgaacccgcatttcttgagtgagagcaaacactcgaggcaggagccagcacccctcccactgcatgcccggcccccagcccaccttgccccctgacccaccttcacccgtgccccttctttctgcccttcctcaccgaagaagggctaggaacaccctggagaggctgcaggtccggccacggacgctcagctgagccccggtctgctccttcagcctccttgctcatgttggagcacaggccccaggcttcctgccagggccccgattcttcttatgtcctccagccccgccctggcgtggacatccactcactccttccagcaataagaaccgtccttggtcgtggagagtactgtgaaacaaaccaatgcacttaccaggaggcacaagactcttgaagaagatgtacaatgaacctttttttttttacaaaaaacaaaaagcaaatattcataaagagaaataaaatgtaattttaaagt

SEQ ID NO: 16688 - DNA, 1236 bp, Homo sapiens
ggggctgccgagcctcagggcaggtctcccgcccggcatgtgtgttcagggactgagcctggggacgcccacccacacccactgcttcctctcggcgcaccccaggggagtgttagcagcgaggccttcctcactcaggagtggaaactcagatgtgtcactcagactcaacttgctgggacactgacaggcgttcctgaggttttcagccacttaggctcgttgcggtttaaagatccctctaggtcactgagaaatgccacagaatgtgcaggaagcctgggaggcttctgtgaggaatgtgaggcacattattggggaaattgaggagacagcctagacactggctggcctgatgttttgttgacagtgaacccacagtgggagagagttttttccagtctgatctggttcttacacactcacacacataactcaaaagttttgtgaacaagtactttccttttttacatgttacatgtcctcatgttttctgttttctgtttcataacacaaggctggttgtggcctacaaacctaatttcatgacccagtggtttgcagtccagcgtggcctacacggatatggggagccactgagggatgttttccccccttgcttgtgccttaaaggcagagaagcgaggcggatgccctggaagcacccagcatcacacccaggcttgtgcggggccaggctgggagcccatgcagtagggcagaaggcagcggaggccaggtctgtcccggctggagaacagcgtccacgcagtcctgcctggggtcaggccctcactgaccctcaggggagcccccaaggtgctgtctgtctagacaggctgtcccaccccagggtggctagtggccatatgcagggaatggtgcttctggctgtggcacgcactggatcacccaggtcccagcagacatggccgcccaaagtcagcaagcctcctttgtgctatgtggagctcacagcctcacatgtgaacacccgtgtctgggttgcctggggtgatcctccctcctgcgtggtggctgtctctggaaagcatcccttgccgctgccatgggcagccccagcccccgtccgtccaggctcacccacagtagtgatgcagacgtgacgtgggggaagggggctgagccctgtggctgggttctgacaactgtaacggttttgtcgagcttaggcccctttggagggagaatcaataaataacaaacaccaactac

SEQ ID NO: 16689 - DNA, 2726 bp, Homo sapiens
gagcagacgccgggatccaggagaatgctcgaggggcgcagagggcagctcccagaccggagaggaccttggacctgttaggcgcatggcaggagtcccggcctcggagccatgaggctggccagccctcagcggggccgggcgggagctggagcctgccagccgcttcctgcctccttcctctgtgggagcagacccgtgggcctcagggcagccagcaggcaggtcttgttgccaatttacaaaccggtggttttctggtttggttttgttttctgcttttacttccatctctcccctcttgaccttccacccactcccctccagggagagagcagcagagacctcatcagcagaccaaggaagtggtgggtgctccccctccctaagctccagggtccctgaatcttctgaaatctcaaatgagtggaggcctcctggggtggcctgtcctgcaggggccctggaatgggggcaagcagctgggtgggcagaatgcagagtagactcgggggaggatcctttcactttccgcttccccttctgatgcatggaggatggtgtgagcttttcagcaggcccggaaaggtacgcaggtgacgccttagcagccccgcagctggtgctctgccccgcggtactggcgccatcagggcctcccttgcccgcctgagagcagcagcagtctctgtcatcccgtcgccccttaccccccaccccaggccactgggcccctcccacaccacctggggagctgagaagaggaggctggagtaagggaggacttgatcatccaagaaatactttttattgctgggagtcttctgaacctcaccaaactgaggccagagctgagctcctgggggagttaattcagaggggagaggccagcacctccctcctccatcgctcgctgtgtgccttaaactccatctcatgtccctccccatcccctggctttccctccctccttgccccatcctgggccagccagcagggctcctcctctggctcttcagacctttcagccagtgctgtcagtgcccctgggagggaagggcatccctgaggcacccgaatggtccctcagggtgcagggaggcagaagcctggccacagaggagcctcctaaggcagcagctgcagcaagcgcaccctctccccactctccccacgccagagcggcttccagagcagatgctgtttccatcctcctcgtcaaaaccattctcgctgctgagcttgacaatctgggcaaggcttgtggggcgcttgacaaacagaatctgccctgtgccgcctggttccgtggcctccagcatgagcctgcaggcagggcgctgcgggaacccagttgtgctgccccagcccatgcctccgggtctgctgtgcatgaatgagtgctcacttgtcccgggtttaggacgtggtcaagtgaacagcagggtctaactgtgcttacttagcccagttcaaacagaacaaaggaaaaatatagaaagcaacatctgttgatcatttaggtttttttttaaaccaccatgtcactttgagtccttcatgggtttttgaacagcatttatcaagaagaaaatgtgggctttttcccctctcccgtgttttgtttgtcctgtagatagagggaggaaagccgtgcagtggcaggcgggaccccctctggtggcgggaccccctcttgcggtggtcttgcggggccagccgggacctgtcactttattatttaaggagtgtgtgtgtagagtcgctggcttattaacagtattgtgtgtgggttgggtttttagtttgttccttctttttgaagtcccttcatttcaatccttgactctctctccccttcccttgcccagctctgttgaatgctgctgtgcgcgtgtgagggccgctctgcacacagggcccttgggttgtgtgaactgaaattctccctgtatttgtgagactcgcaggagtccccatctgtagcacaggcaatgccagtgccatgctgcagcctcagaaaccaggcctctcactccagcagcaggcagaaccgtgtctgtggtcgggtgctgtccacagctctgtctgccttgttcttgggcttgagctggatagaggtggggtctcttcaccttccctgaattcagaacagaccctgtgcctggccccagtgtgcccaggcaattccccaggccctcactgggagcccttggtgttctgagcagcagggcccaggcagcacatgagcagtgcccaggggctccctgcgtgaggacggcaaggtgcgatgtatgtctaacttattgatggcaggcagccccctgtgccccctaagcctggccctggttattgctgagctctgtgctcagtgctgcggcctggccgtggctcgtctgttcctttggggggcccgggcgggttgtgggaatcagtcttcacagacagacgtgagccaggcggaggactcgttccttgcagaggtcagtcctcacctgcaggtgtcggggtgtgggggggcaaggaggggcaggcacacaccatgtctgacctgaacccgattctggggagcatcttcccgctccggccccacgacctccacagggttacattgtaatatatatgccccagctaacctgtctgatggtggcatcttcctgcagacatttcaaacatgtaacttttatatgaaaaaaaataaacacagatgaaagctgcccaatgcc

SEQ ID NO: 16690 - DNA, 426 bp, Homo sapiens
cccccacgctggccccagcctcagaccccacccagcaccttcccagacacgcaggaagcccacagaaggctcagctggttcctcactgcccagatgtgtacagctgctcctccctttcataaagcagcgccatgtgtgcagaggccactcttgaagagcagactccctctgtggctgatgggactaattattcccactagccagcggactgaaggcaaagaagacctttctagaacctggtagaaggaagctgtgcagcatgctcctcgtccatgtgtgtcggcagtgctggtgtctgtcgtctccgcgagctgttactggaatgagcccttgtgttcatgggtatcgtcatgcggggttcttgtgttttgtggggcttgggttttggtaacttatttttataagcaataaaccttttgtatcctg

SEQ ID NO: 16691 - DNA, 2798 bp, Homo sapiens
gaaagcccagtgacatgggccagcagccacagcatattgtaaactgaagatgaccagctcgtgggaccatctagataagcttgttttttgtaaggagtttgtgtgctgttggaaaacatggaaaatgcatccttaacacctgagcctctggtcatcttcagtattttctgtcatttgcaaaagctttcagagggcattgtgtatccgtaataatgtccttgaagtcagagactggaaatgttgatctcttagtcttctatagacaaggaggtcagactggagtgaatgttgtaaaagttgaaatgtatatttgtatagcaaataacaaaatccttttaaaatttaatctagtagaccgcttttctttccccctgtttaaaatgttaatcagttttcaacagaacaaactttatattaccaaaaaaaaaaagatgggaggagggcgggtcctttcaaccattgttagagcaagacagataattatttaacagcctagcttggaataagctgagttagtgctggtgggtcaggtgtctctggctctattaaaaaaagcaaaaacccccccaaaaacctggagtctcctaggggacactttgggcagcacggttatgttaggtaaagtcttgctgacatggtgcatttttagatagagtgcattggcccagggtattatatttctgtgatgagttcatttacctgtttcagtatgcacatagttccctagctaaaattcctaatcttcttgagagagaagaatatggagtgaaagaataattcttgagctatcattcaaatgctcccagcatattgtgagccttgtgtgactggtgaggtacagacatttggttgccaaatgctagattagcgctgggtcagctgtggaagaatcgcctcagcttacagattgtcagacagatctaactagttttccagaaagcctgggaagctgtgtgttcaacatttcccaagggattctgatcaccaggcagcttgggaaccactggggcaggccaaatagaatattttgggcgggaaagaagcacccgatttaaaatgaagcgtaaccagaggagttcagaactgggaagagagtggtagacttcctgtgatcttcagaaatcatctacctggtaaaaatacatgctgtttagaatatctgataggtgtttccagctactattagaggtgatagtgcttttgtgggggaaaaaattggtcatggtgaatggagatcgaggaagctcgggacaagggaggggtgggctgcctgattttgtccagttttccaaatatccacgcagtgaactggagtatcctaaacatgagaatgtacagttgacagttgtaaaaactagggatctgtagtgaatgctgtgcagccccatatctcatttgggggtaggaaaatagctgaagattcatgtgcattatttgacatttcctttgtcatctgctttttaagcaaaaaagggttttgtgttagaaattctacttgagcagattataaagagctttaaaaaacaactttcggttgccaaaagtttgagcatttgatttcattacctgtgtctccctcactggtgtccagacggtcaactgaatactcctgaaacccagggagcaggtgacttcctggagtgctttgtccccagagtcagccactgcttcctctgtgggggtggagagtttgtctttggccatgcagtgtgcgacagttcaggacgggtagggatgggtcccattctgtctgggtcaagggctctatcagcttcttccatgtgcctttgggaagaaatctcgttactttaagtttgctttcctgttatcttgatgaagtgcccattttagcagacacttgtagtgctgaccacttagggaatgtacaaactcctaagcttctaaagggaggcatggcaaaaacgttggggtcaggatgtctctcacgctgctcatgttaatactattaacacatgatttgagaaataagttttctctaaaatgcatattttgccgccacacactgaacaatattatttccagtgaagtttgatgcctgttcttacgttgtgttcacctgttggttcaccactcagcagatctgattctgcaagaattaatggtagaactagatcatcctttctaacagacgagcctgtgtcctgtgacggcctttcacagcggaatgcagttgtacctcacattacttttgaaacttcactcgttccagttggtacaagtatttgccaaagccatttcctatgttcaccgtggcccctcctgatgtggctgtcagcgcagcgttgttgaacagggctattctttttacaaggtgtgaagtgtggctcttcgcttcgtctttgccatggcattaaaagaaagttccctgtcttctttcaatattagttatttcaaatgaatatgtgctacttaaaagcttgttttgtttctttgtatataatttgccttggatttattgtgcacagtttgttgagttgtatgtttttgtgaattatcaggagtaaatttgacaagtacatgtgaataacctcctgtaaatgaattttataacaaaaatgtactgaactattttttaaagttgtgcagattagcaattttttgctatagctttgacttttctatgctgtgaattaatagctgcgatttggcaaacagccctgttgtctttgttaaaccctaaattttaagaggaaatggcagaattaaaagcagaaacaagaagatggacatggattagaggttatgtattatgaagtaaactacaaggtactaacatc

SEQ ID NO: 16692 - DNA, 367 bp, Homo sapiens
ggtcaggagttcgagaccggcctgaccaacatggtgaagacctgtcactattaaaaatgcaaaaattagccgggtgtggtagtgcacacctgtaatttcaactacttgggaggctgaggcaggagaattgcttgaacccaggaggtggaggttgcagtgagccaagatcgcaccaccgcatgagagagagagattactatttcttgtccctttttctcagtttgattatatttatatacatatgtcagtaaatctgttttcagtattgatgtttaataaagaatgtacaatggccagagttctactctttcctctggagcattaaaatatattgccattcctattaaaacgtatttgaatgtgaaaa

SEQ ID NO: 16693 - DNA, 577 bp, Homo sapiens
aatctctctgggtcttcgagtggaacctggaagccccgggtggcagtggattgatgtccagttcttgtcagaggaggcttgtgaaaaataactgcgcctttgcctgaataccacgtccccaagaatcagaggggccacagcccttctcctccatgggaggccctggagcctgatagaaatcagtggtgtggggcactgtagagactagccagctcccgacggaaggggtctgtgtcttgtattgatcccatcagtgcccggcactcccttcacccaggtgctgacgtgccggggttgagctggcaccccgggatgtgatgtaagaacgccctgcgcgtcagcctggaacgggcttgattgctgcccttaactgtgttctgaagtttcacagcttggcttcagcctatcagcgcatacattggcatgaattttgtgaattagggtgttaaaaactggaattgaatttgtacaaaaagagaatatatttatcactaattattttcttaatgtaggaatgtaccgttaaaaaggaccaaaagtttttggtctgggtcaaaaaatacgaatgtgttctcag

SEQ ID NO: 16694 - DNA, 498 bp, Homo sapiens
agaactcaccctaagccagaggaaaggaaccttgcttttaataccatcattatgttgacgagttgataagaagtaccaccgaatggccggaaaatggagtttctaagccacctgattttaaggctgacattaggttttctgttggtctccggtggctgtccttgattgtccctggatggagtgcagtcacctttttcccagaaaggaaagatacctgcagcccgccctgggcgccaactgtcccttggcatcctccttggctgtccggcgcgtgcatttctttttcagaagatgcacctaaatcacctgtgctgctttcctccaccttctccgtatttttttccgcttgaagcatactgttctgtctgtgcagttcttaatttcctctcctcctggggaatttccaccgtgccaggaggctaggagacaaaggagatacggctgtgaagagtcacaatgtcagttctgtgtcccaaataaatgtagactttcgtgctt

SEQ ID NO: 16695 - DNA, 110 bp, Homo sapiens
tgggttcagagccaggagcgctgccccagggaaagagttaatcccctgcccccagccccccagcctcggcacagctcccctaaaaagccaataaagcctgctggatacag

SEQ ID NO: 16696 - DNA, 4886 bp, Homo sapiens
ggaatgatggtcaatcagtgttaacttgcatattgttggcacagaacaggaggtgtgaatgcacgtttcaaagctttcctgtttccagggtctgagtgcaagttcatgtgtggaaatgggacggaggtcctttggacagctgactgaatgcagaacggtttttggatctggcattgaaatgcctcttgaccttcccctccacccgccctaaccccctctcatttacctcgcagtgtgttctaatccaagggccagttggtgttcctcagtagctttactttcttcctttcccccccaaatggttgcgtcctttgaacctgtgcaatatgaggccaaatttaatctttgagtctaacacaccactttctgctttcccgaagttcagataactgggttggctctcaattagaccaggtagtttgttgcattgcaggtaagtctggttttgtcccttccaggaggacatagcctgcaaagctggttgtctttacatgaaagcgtttacatgagactttccgactgcttttttgattctgaagttcagcatctaaagcagcaggtctagaagaacaacggtttattcatacttgcattcttttggcagttctgataagcttcctagaaagttctgtgtaaacagaagcctgtttcagaaatctggagctggcactgtggagaccacacaccctttgggaaagctcttgtctcttcttcccccactacctcttatttatttggtgtttgcttgaatgctggtactattgtgaccacaggctggtgtgtaggtggtaaaacctgttctccataggagggaaggagcagtcactgggagaggttacccgagaagcacttgagcatgaggaactgcacctttaggccatctcagcttgctgggccttttgttaaacccttctgtctactggcctccctttgtgtgcatacgcctcttgttcatgtcagcttatatgtgacactgcagcagaaaggctctgaaggtccaaagagtttctgcaaagtgtatgtgaccatcatttcccaggccattagggttgcctcactgtagcaggttctaggctaccagaagaggggcagctttttcataccaattccaactttcaggggctgactctccagggagctgatgtcatcacactctccatgttagtaatggcagagcagtctaaacagagtccgggagaatgctggcaaaggctggctgtgtatacccactaggctgccccacgtgctcccgagagatgacactagtcagaaaattggcagtggcagagaatccaaactcaacaagtgctcctgaaagaaacgctagaagcctaagaactgtggtctggtgttccagctgaggcagggggatttggtaggaaggagccagtgaacttggctttcctgtttctatctttcattaaaaagaatagaaggattcagtcataaagaggtaaaaaactgtcacggtacgaaatcttagtgcccacggaggcctcgagcagagagaatgaaagtcttttttttttttttttttttttagcatggcaataaatattctagcatccctaactaaaggggactagacagttagagactctgtcaccctagctataccagcagaaaacctgttcaggcaggctttctgggtgtgactgattcccagcctgtggcagggcgtggtcccaactactcagcctagcacaggctggcagttggtactgaattgtcagatgtggagtattagtgacaccacacatttaattcagctttgtccaaaggaaagcttaaaacccaatacagtctagtttcctggttccgttttagaaaaggaaaacgtgaacaaacttagaaagggaaggaaatcccatcagtgaatcctgaaactggttttaagtgctttccttctcctcatgcccaagagatctgtgccatagaacaagataccaggcacttaaagccttttcctgaattggaaaggaaaagaggcccaagtgcaaaagaaaaaacattttagaaacggacagcttataaaaataaagggaagaaaggaggcagcatggagagaggcctgtgctagaagctccatggacgtgtctgcacagggtcctcagctcatccatgcggcctgggtgtccttttactcagctttataacaaatgtggctccaagctcaggtgcctttgagttctaggaggctgtgggttttattcaactacggttgggagaatgagacctggagtcatgttgaaggtgcccaacctaaaaatgtaggctttcatgttgcaaagaactccagagtcagtagttaggtttggtttggttttggacatgataaacctgccaagagtcaacaggtcacttgatcatgctgcagtgggtagttctaaggatggaaaggtgacagtattactctcgagaggcaattcagtcctgggcaaaggtattagtacaataagcgttaagggcagagtctaccttgaaaccaattaagcagcttggtattcataaatattgggattggatggcctccatccagaaatcactatgggtgagcatacctgtctcagctgtttggccaatgtgcataacctactcggatccccacctgacactaaccagagtcagcacaggccccgaggagcccgaagtctgctgctgtgcagcatggaattcctttaaaaaggtgcactacagttttagcggggagggggataggaagacgcagagcaaatgagctccggagtccctgcaggtgaataaacacacagatctgcatctgatagaactttgatggattttcaaaaagccgttgacaaggctctgctatacagtctataaaaattgttattatgggattggaagaaacacgtggtcatgaatagaaaaaaaacaaacccaaaggtaggaaggtcaaggtcatttcttagatggagaagttgtgaaagatgtccttggagatgagttttaggaccagcattactaaggcaggtgggcagacagtgacctctctaggtgtgtccacagagtttttcaggagagaaaactgcctgacctttgggactaagctgcggaatcttcttactaagcttgaagagtggagaggcgagaggtgagctactttgtgagccaaagcttatgtgacatggttggggaaacagtccaaactgttctgagaaggtgaactgttacgacccaggacaattagaaaaattcacccaccatgccgcacattactgggtaaaagcagggcagcagggaacaaaactccagactcttgggccgtccccatttgcaacagcacacatagtttctggtatatttgttgggaaagataaaactctagcagttgttgaggggaggatgtataaaatggtcatggggatgaaaggatctctgagaccacagaggctcagactcactgttaagaatagaaaactgggtatgcgtttcatgtagccagcagaactgaagtgtgctgtgacaagccaatgtgaatttctaccaaatagtagagcataccacttgaagaaggaaagaaccgaagagcaaacaaaagttctgcgtaatgagactcaccttttctcgctgaaagcactaagaggtgggaggaggcctgcacaggctggaggagggtttgggcagagcgaagacccggccaggaccttggtgagatggggtgccgcccacctcctgcggatactcttggagagttgttcccccagggggctctgccccacctggagaaggaagctgcctggtgtggagtgactcaaatcagtatacctatctgctgcaccttcactctccagggtacatgctttaaaaccgacccgcaacaagtattggaaaaatgtatccagtctgaagatgtttgtgtatctgtttacatccagagttctgtgacacatgccccccagattgctgcaaagatcccaaggcattgattgcacttgattaagcttttgtctgtaggtgaaagaacaagtttaggtcgaggactggcccctaggctgctgctgtgacccttgtcccatgtggcttgtttgcctgtccgggactcttcgatgtgcccaggggagcgtgttcctgtctcttccatgccgtcctgcagtccttatctgctcgcctgagggaagagtagctgtagctacaagggaagcctgcctggaagagccgagcacctgtgcccatggcttctggtcatgaaacgagttaatgatggcagaggagcttcctccccacttcgcagcgccacattatccatcctctgagataagtaggctggtttaaccattggaatggacctttcagtggaaaccctgagagtctgagaacccccagaccaacccttccctccctttccccacctcttacagtgtttggacaggagggtatggtgctgctctgtgtagcaagtactttggcttatgaaagaggcagccacgcattttgcactaggaagaatcagtaatcacttttcagaagacttctatggaccacaaatatattacggaggaacagattttgctaagacataatctagttttataactcaatcatgaatgaaccatgtgtggcaaacttgcagtttaaaggggtcccatcagtgaaagaaactgattttttttaacggactgcttttagttaaattgaagaaagtcagctcttgtcaaaaggtctaaactttcccgcctcaatcctaaaagcatgtcaacaatccacatcagatgccataaatatgaactgcaggataaaatggtacaatcttagtgaatgggaattggaatcaaaagagtttgctgtccttcttagaatgttctaaaatgtcaaggcagttgcttgtgtttaactgtgaacaaataaaaatttattgttttgcacta

SEQ ID NO: 16697 - DNA, 381 bp, Homo sapiens
tatgtggttgggaaaatttcacactgctcatttcaggagtcacttttaaggatccatgatattagcaaagaaagttactgttgcctcttagattcatcttgaagtcttgatttacaaaatgcaacttgtttcttgatacgcttttaataagatgcctttttctagatgaaaaagctaaatttaagctgaacactggccatggatataaacctcgtggatgacttagcattcctttgccactgctgatgtactttattaacttcccaggctactctttggagcccatctatggtttgtggtatgaccactcctccaacttctcctggaaatgtcccacctgatctgtcacacccttacagtaaagtctttggtacaactggt

SEQ ID NO: 16698 - DNA, 867 bp, Homo sapiens
gggcatcctcccagggtctggctggctggtagccaagcacttatggaccagagtggcccaggccagctgggcgccttcctcccacctgccagcccagggtaccccagactccagtttcatcctgaacctctcccgctgctgggattgacgcctgccattggtcaggctgacctggcctcccgtggaccactcgctgccttaggtgccttctgctctctggaaccagaggactagctgacttttgccaaggagcagtgccaacgggcatggcatggtgccctgcctgcccccgggcgccacctctgtacacttccctgacaccttcccaggtgtgggtcactgccacctgtgcccatgggcaccccagagcacccactgtgaccactgcagttctctcatgcccacaggcactggcctgtgaccttcgcaggggtcccggcccctcccaccactctagcctttctcaggctgcaccaaagattccatcatcagggccaactgagagtgagggagtctcacccaccgcttaccccagccctcccctgggagcagagagagaaaccctcttcatggaccagactctgcacccggtgagtgaggacagtcccagctgagtcccatcgatgttgaatctcatgccactgcaagtgccattcaccactgcgtcctgggctttacgagaccatgcaagacgggggttagtgaggaaggaggatttggggtgggggtggggtgattgaatatttgtataaaaagcaaaaagaaaaaaaaaatgtttgtttactgattggggaggggcaatatttatttgttgtaaatagcaaatgctagacttgaatattatattaaaatcctgtttctactata

SEQ ID NO: 16699 - DNA, 624 bp, Homo sapiens
ccacggagctgggggttgccatggatggggacccaaagacctgcagccaccagtgcttcactagcgtgcagaccagccctgtcccgcctccctgtcagtcaggcgaattcaaccggaaaagggacgtggaaaggccactgtgaactgcagagggctgtgcacacagtagcacacaggatctcacagtaacgcggcatgggaacagtgagacagggggaggggaggcgcagttacaaaggcagggcccggcaggcttgccacgttctgcagccgtgcctttgcggggcaggctctgaagcctcagcccgactcagagtgcctgaaccctgccgcgccagtcccccgtttattgcatattgcccttaacgtagcatttctaataccctggtgtgaaggcgccctagaccccttttctctggtcacaggggtcctgggtcctttgatgtctcccaaccacatgtagccaattcctcactcaggcccccagagtgagcctttgaaatggaacaggtctaggctccctcggtttcctgcaccccaaagtgagccgcactctcaggggactagccacctccttcttaagagggtttggggcagtttataataaagggggcgtgtgctcaa

SEQ ID NO: 16700 - DNA, 132 bp, Homo sapiens
cagcccccgggtctgcacctccagagcccaccctaccaccagacacagagcctggaccacctggacctaccctccagccatgacccttccctgctcccacccacctgactccaaataaagtccttctccccc

SEQ ID NO: 16701 - DNA, 490 bp, Homo sapiens
gcggctgccaggggctctgggagggctgccggcagccccgtccccctcccgcccttggttttagcagaacgggtaaactctgtttcctttgtccgtcctgttgtgagtaactgaagcctaggccccgtccccacctcaaatcacacacaccccctccccaccacagagacaccattacatacacagacacacacagaaagacacacacagacacaaaatcacacacacaccctccccgccacagagacaccattacatacacagacacacacagaaagacacagacacaaaatcacacacacaccctccccgccacagagacacaccattacatacacagacacgcaatcgcagatacgcccttccggccacagaaacacaccattacacacacatacacagaaagacacacacagacacacaatcacacgcagcccctccccgccacagagacacaccattacatacacagacacacacagaaagacac

SEQ ID NO: 16702 - DNA, 1152 bp, Homo sapiens
gtctttcccacctggggccgccgtcttccgtcctaggagactccaggacaccctctgagtccttgacgctggctctgtcccaggatctccacagacctcggcctctccatgtgagggggacacagtggtgctctgctgagttgtgagggcccagatcacagatcccatgtgagaaagagagagtttcagcgtcatccttgaacgcaggatccgggaccttcagacccagggaaagggtgagggagactggggcctggtctgctttcccgggcctgaaagcttccccgaggtttgcagggtcagggaggaggaacggtgggggtgggcagtcactgcctgttccccactgcctgtgttcgcaggagccacgggacagaagacggtggcctctgctgccgggccacgttagtccgcagctcacccgaacagaggacaaccctgaggtgtggcatatgggcacctggcactgggagtcgggggagcacgtccaggcgtggtgcatcctggggcagaacgccatggctcctccccgctctcttggcttctgcctgttggggtctcattcctttctgttccccagtgccccggggcggcattttactgctcagaatttggagggagggagcagtaccttcccggagtccacgcatgtgagttgggtcaagtgcattggacctagggaaagagaaagaaagaataaaagctggagagagagtgaagtgaatgcaagataaaaagtgggatggaagaattaaatccagagttccaggcaatcaaaatgagtgcaggttgaaagaaaacaggtgaattttagtggcatatggatgataaagctgtaaataaaattcttttgatgaaactctccggttacgagacaaagactgtaactgaacaggagctggtgtgactgttaccagacagaggcaactgatgaaaaagccctgtgaaagataggatgtgaggtgagcatgagcttgagctgagagacagacacaacagtatctgaaaagaatacatactctttccatgcatatatggaacatggatggaaactgaccacctactttgtccagaaaagaagtcttaagatatttcaaggaatcagtgtcgttatctgaccgtatcccaatgtcattaaaaaaaatttgagct

SEQ ID NO: 16703 - DNA, 3214 bp, Homo sapiens
cgctggactccccatgcagagcgggagcctgcctacctgggcctggccagcaggcagggctgccttctgctttttcaaattcttgctggtcttagcagtggagccatgcctgggtttcagagcagagctcctggccagagcgtttgaccgacagacaattcacatccatatgccagggccctgggcctttcccacagtgcaatgtgatgaaaaccacaggactcacgccagtcggataggccgagtctggagaagggaggcgcctggctgtatcccccgcaggccctcttccgagagccttcctcctcgggcagtgcgttctggggctgtgctgctcctgttaccttctgaatccatatgtagagatttcagccaaggctgggccagccttttttgggcagtcaggtccacacctatgtccagggcaccagggatgcaattccatgtggatgtcaccaaaccccagtgtggaggcagggacagtcatgggaatgtgggggatgaagcccaggcagggaatggccttgaaagccattggagctccaattcgtgacccactcagccttatccacggagctggagccaacctacgtgccaggccccatgctgggtcccagggatgcagaagggtcaaaacccatcatcctgacccttgtggggctccgtaagaagctgaaaccttcgaccgtttgagctggaggggccctgagaaatcagagtctacgtatcatttacttagggggaaacttaggctggagacagggaggccttccactctgccccattagcttagaaaatcaagattcagtccagcagatgcagagtccatgtccatcttgtgccttctcctggacaaacctttccttcctggtggtggatttaaaatactcctttctgcccattggccatgctgggagccacagctatccagagccagcatgacctggggcttggtttccctgccctgggctcagtggcactgctgagctgcagcagtcctagagttttccagggggttctgagggaatctttggtccccagtactcattaactcagcagacatgaggcagcatttcctccacactagggtggctgagaggggtcctggggtgtttcagacccttctgggcatctccttccacagctgttcagtttgtcggtctctttgaggcagccaccgtccctgagggcccctgcacagagcagctgtgggcctgtaattcagcctgcctgccttgccttggggcagggagagagggaacctgctcacggccctgcagcagagcagggcgcaaacccaggacatctgtgccaggcttcccatgccctcccccaacagtccctcagcttcacccagcggggcttccaggccagcctgtgtcccctcccgcaggcctcctgtccacaccagcgccccctggggggcctcacacagcccctgtggcagaagcagttgccctcctctgtacattgcctttaagcgaccaggtcctggccgagtttcctctgccccttcttgctggtcccccaaagggcgctccgctccctgccctgccctgccctgccctgttccgcatgagctgcgcctctgtgctcgcctgccccctctctgcttgttagttgctctttctggctctgcctctcctttgctttcctcgggatgccactctgtgcccaggacggttctgagactgaacactgagggcaggagcaagggaggaagccaggggcgaggcaggccgcgggaaagccagggcccctgcctgcaggttagaaagaggcgagcgtggattgtcacagctgcgggcatgggaagggctagctgagctcttcacctgcatcctggctgccgtgaggattccccgtgttagaggtggggacgcctgctggaggccgcctggctgatgtagggctatcgggaagtgccagggcctgtgttcccaactgtcgcccccttcaggctaagtctcaggcagggacagacccagaaagaacacagtctgccctcagagagctctttgcagtgtagtgacactggggtttctgcagtcagggaggagggagggtggccaggctgacagctttttgcaagaggagggggaccagcaccagctgggaggcataggctaggacaggcccacgtggaggctgggcaggaagggcctgctgaggtcacacagctgttggtggttgggccagggcggcttcctcctttcagaatgctagggtggctctcaccactggccgcctctccttgccaggcctgccaactcaggggacagatggagcaggagtggagaaagggaaaggcaggtctggggtgtggtcgtgttttcttaactctgcttctgtcttgctctcccctcccctggctttcctctctgcctgctcctgtctctccctggggtttctggtggtggaaaagctcaagcctttgcgaagctaatgacctgcctctgtgcgaagcttacgggaggctggacctcgacacagactctgctgatggcctctcggcccctctgctggcgtccccggagcccagtgctggccccctacaggtggcagcccctgcccactcccatgctggtggccctggccccactgagcacgcctgagcctccggggccacgcttcgttctcaggaacaaaacctgaggcagccctttggatgccctcacagccttgcttctctcagcctaggttcccatttggggacttcaggaccccagagccactaggacttccttgggaagcccgttagcccagggtgggtcccaccaggacagtagggaaacagttgtttccctagccatttccgaatagcccatcattccgagtcatcatctctgtttgctgccttcctggccagccaggtggaagaaagtttccaagctaggtctggcccgttggggatctcagcagtggggcaggagggtgcctgatttcggggagtcctgacccgagcctgttgtcagagttgggaggggctctgagcagtgttgggcaggccgggtctcccatcccgaggccagcgttcctgtgcagagccccatccactggttcttgccctgagccacatatgtctgtgccatgggctgagtgccacgacaggcccgtgtgacagctgctgcccacgcatgtggaagctaggtgggactcattcctaattctgccgttgtaatgagacttgattaaaacaccgccacttttttgc

SEQ ID NO: 16704 - DNA, 102 bp, Homo sapiens
cagatcagctgctgaagccctgtccctggataatgcagtatttcaagactgcctttatgctggatcatgtgctactggtataaagttctggccttctacctt

SEQ ID NO: 16705 - DNA, 2029 bp, Homo sapiens
cagtcacagatccctacctgcctggctaagacccgtggccgtcaaggactggttcggggtggattcaacaaaactgccagcttttatgtatcctcttcccttcccctcccttggtaaaggcacagatgttttgagaactttatttgcagagacacctgagaatcgatggctcagtctgctctggagccacagtctggcgtctgacccttcagtgcaggccagcctggcagctggaagcctcccccacgccgaggctttggagtgaacagcccgcttggctgtggcatctcagtcctatttttgagtttttttgtgggggtacaggagggggccttcaagctgtactgtgagcagacgcattggtattatcattcaaagcagtctccctcttatttgtaagtttacatttttagcggaaactactaaattattttgggtggttcagccaaacctcaaaacagttaatctccctggtttaaaatcacaccagtggctttgatgttgtttctgccccgcattgtattttataggaatagtgaaaacatttagggacacccaaagaatgatgcagtattaaaggggtggtagaagctgctgtttatgataaaagtcatcggtcagaaaatcagcttggattggtgccaagtgttttattgggtaacaccctgggagttttagtagcttgaggcaaggtggaggggcaagaagtccttggggaagctgctggtctgggtgctgctggcctccaagctggcagtgggaagggctagtgagaccacacaggggtagccccagcagcagcaccctgcaagccagcctggccagctgctcagaccagcttgcagagccgcagccgctgtgggcagggggtgtggcaggagctcccagcactggagacccacggactcaacccagttacctcacatggggccttttctgagcaaggtctcgaaagcgcaggccgccctggctgagcagcaccgccctttcccagctgcactcgccctgtggacagccccgacacaccactttcctgaggctgtcgctcactcagattgtccgtttgctatgccgaatgcagccaaaattcctttttacaatttgtgatgccttaccgatttgatcttaatcctgtatttaaagttttctaacactgccttatactgtgtttctctttttgggggagcttaactgcttgttgctccctgtcgtctgcaccatagtaaatgccacaagggtagtcgaacacctctctggcccctagacctatctggggacaggctggctcagcctgtctccagggctgctgcggcccagccccgagcctgcctccctcttggcctctcatccattggctctgcagggcaggggtgaggcaggtttctgctcataagtgcttttggaagtcacctacctttttaacacagccgaactagtcccaacgcgtttgcaaatattcccctggtagcctacttccttacccccgaatattggtaagatcgagcaatggcttcaggacatgggttctcttctcctgtgatcattcaagtgctcactgcatgaagactggcttgtctcagtgtttcaacctcaccagggctgtctcttggtccacacctcgctccctgttagtgccgtatgacagcccccatcaaatgaccttggccaagtcacggtttctctgtggtcaaggttggttggctgattggtggaaagtagggtggaccaaaggaggccacgtgagcagtcagcaccagttctgcaccagcagcgcctccgtcctagtgggtgttcctgtttctcctggccctgggtgggctagggcctgattcgggaagatgcctttgcagggaggggaggataagtgggatctaccaattgattctggcaaaacaatttctaagatttttttgctttatgtgggaaacagatctaaatctcattttatgctgtattttatatcttagttgtgtttgaaaacgttttgatttttggaaacacatcaaaataaataatggcgtttgttgta

SEQ ID NO: 16706 - DNA, 889 bp, Homo sapiens
cagtcctgccctgctgctgctgccgccccgctacagaggcaatgtgaccagtcacagggacagatcacatctccccagagtggcaactctggtgaaaccttttcagaatcatggcagaggggcgtggcgtggtgctactgagaaggtcctccttcctcttgactttgtggtctgaaacctggtcttactgtccatgtgtgtttgggcccggatggtcagggtggggagcagggacggccatgggcacgcctggccacgctttaccgactgctgaccccctgggccaggtgaggttggggcctgtgggccgccagtccatacggtgctgtcactgcccatcttcggtgacaccctggggtgaggtgctcagcaccttcctctcgaggagccacattttcctcctttgtgttaggggacataacaagctctgctgggcttgagggacccagaccaggtgtctgcagtcagctcctgagacacagctggccggcacaacaggtgttacatcaggggtttcctgtggccgtttgaactttgagcatttatctaaattaaattggcccagggttggctggtgggtcacccagcagaggcttctccccatagcacgaggatgtgttgcctgggcacggtgactgcggttattcctggaggtcggcagacatgccaaccttgggctatttgagctggagaagctatgtgatgctagccggtggctttctgggctaggccccagtttgaggctcccctgggaactagagccaggaacagccagtggcactgacaaggggacggagtccaaggcgttattgggccacctgacagctggacagaaaaggggcagacacaccgaggatgcgatttaaaataaatgcagatgtttacttgg

SEQ ID NO: 16707 - DNA, 923 bp, Homo sapiens
gtcaaggtccccgcctggagggggccaaacccccagtggctgggcctctgtgttggctacaaacctgcaccctgggaccaagaggcagcagtcatccctgccaccagccagagcacaggaagagcagtgtgatggggcctcagcagcgggtgcccctggctcgggacaggtagcactgctgtccagccacagccccagcccaggcagcccacagtgctgcacgtagccatgggccgcaggagtgcatacaaccctgcatccagggacacggccctgctgggtgacctcaggcctagtccctttcccttgcgtgaaggacacgccccacagaaggctacggggaggactgagaggacagggctggaggcagccaagtaacgtagtcatatcatcgcgctctgatctggtggcatctggctgtgcaaggaagacccggctttgccctcacaagtcttatgggcaccacagggaacatcctggacttaaaaagccagggcaggccgggcacagtggctcacgcctgtaatcccagcactttgggaggccaaagcaggtggattacccaaggccaggagttcaagaccagcctggccaacatggtgaaaccccgtctctactaaaaaatacaaaaaagctgggtgtggtggcacacacccgtagttccagctacttgggaggctgaggcagcattgcttgaacccgggaggtggaggctgcaatgagctgagatcatgccattgcactccagcctgggcaacgagagtgaaactccgtccccaccccctgccaaaaaaaaaaaaaaaaaagccagggcaaaggacctggcgtggccacttcctcctgccccagcccaacctctgggaacaggcagctcctatctgcaaactgtgttcacccttttgtaaaaataaaggaactggacc

SEQ ID NO: 16708 - DNA, 327 bp, Homo sapiens
gggctcagaccacatgccccatcccatgctgtccatccattctcacaggtcccaaatggccctgggtcccaggaccctggacccagccagaacttgtgccctccctgtccttagcctaggcctagtcctgcgaaaacccccaaaccagatacggacagagaccaagatggcccatcctgtggtcactgactggaaggcagtctctaatccaccccaatcctcccagaaagcaaacctgtaagtgtcttgggctcagggaccatggcttgtagccctttccaagcttctagaaggtgcttagtaaatacttgataagccccacgtgaa

SEQ ID NO: 16709 - DNA, 2167 bp, Homo sapiens
cggcaggaacgtggacaagactcgcagattttcttgggagagtcactccagccctgaagtctgtctctagctcctctgtgactcagaggggaaataccaacctcccagtcttccactgcccacagggatagggagggtgttgagaatcctaaactcgaaccgtttcactgtcagcctgccctcggcgacccatcactgggtatgctattgtacatagaggaaacctgggctagccccacccagagcgcagaggagggggcaccgacagcgctgcgagccaggctctgggtagtggctgaggccagaggcccatcgcctgcccctgtccaactgagatggccttcaggagcctaggtttgaacagcagatgctgtcccaggaagggctagggacatcggaggggacctgcccccacaccctctgctcagcccctggactcagccttgcctgtcttttcctgctgctcccagggggaggtgtcagacctcgggaggcagacgggaccagagccaggctgttcactgtgggcccacttgccccactgtgctagggcgcgggaggagagagcactgtggtcgccctctgcagccactctggctcccaagacttccctgactcccccactcccctccttgccaggggcacacccggaccccacacggcaggcccctctcttgggaggggcctttggaatgatgaaattccaaccctgctgcccggtcagcggtaccgtttcctgccctctctctgagaggccctttctggagtcctgggaaggtgtctgcctggccgcgctgccagatcagtacatcttttgtaaaaaccctgaaatgggcagggaagaaaacagggatttcccctctctagatccctgccaggtccctctccaggaggcccctctgctctcctgaagggtggtccctgagggtctgcccagccttggcacgagaggttggttccagcccctggcagggcttccttccaagggcccctgcagcctacaaactgggcctcgggcgactcaaaataagtgctcttgggggtggctctaccccattacctcccccagccacaactcctggccttcgacttctggctgggttagccagaccctggtttctctaccctgatgttgcatgagacctggtaacagtgtctccctcccagctccttgccaaagcctctgttgagacctgggcttcttgtagccccttctccctctggccagctgcacagcctgtgggaggtgcccggcccaggctgggtgtgggggaagctggtccctgctgtgggtggcgctggggacctaggggctccttctgaggttggccttgtggcctctgggctgtatgcctctggggtgtagggaagaggcgggaggagtcatggggatggggagcggcagggggagagaggggccctcgacaaaggcttgggaaatgaggggaggtggaggcagggcaggggaagcgaagagtcagccttggagagagcaccctggggcctccgtgtcggggtacacccagcactttgcgacctgcggcccagcaggcgcggaggatggcggggaggaagccagcagcccctgtgtttactgtcgtcagaaaggtcttgtgttttggttttggggtttttgttttgtttgtgttttgtttggcttgtttgttttttaaggggaaaaaagtttgtaattatttcatccaaatctcccgttatatatctgtgaataataagagattttataatagcaagaaaatgatgtatattttagtttgttgacaaataagtcatcatgatcacgaaggacactgagaaaaaataatttagaaccctggtttttgtgaatttttttgttttgtgtttctttgttttgagatttgtgtttggtttggtttttgcactgcactaaggcaggagggttggagggctgggtgcagcctgggagtccgatggttttcagcaggagacggggtgtcccctgcagggggctaaactgcaggggcctgagattagctgtgaacatgtgggagcccgatgcatgtgggtcagggatctgggggcccccccagctggcgggaaccccaaatggacacaaactgtacatttgccaatgggtttttttcagaccatggtttttacttgcaaataaacctgagttcttttctgc

SEQ ID NO: 16710 - DNA, 749 bp, Homo sapiens
actggcttcggacagaacaggacagatggatgtcgcacacgccgagactctgccgtacccctctgtggttcatattactacttctgttccatggtgtgcaggtctgcttcttaattcagtgttatgatatcttccagtttttgctttcataggtcagagatctatcttgtgtgtgcgttagacttgatgagaaggtgtgaactctgcagaaagtctcttcttcatcactgaattcagtcacttggagatgacaacttcaaatgctaacccgatgaccccagaaaaccgtgtgagattcgtaccgaagaaccttgtggaatccctttgcttaggcccaacctggtcgatagctcgagaaagaattttttccaaggaaatgtctcggatatgggtactgtatttgaaagctgttagctttgtcaacacgcattgtccttgtcatttgggccccgagctctgaccctcgtgtctgacgcggccacctctttctggaggggctgaggacagatgtgcctgcttgtggagaccaggctgggcctaagcgaagggtcatcgcagccccagcccggagcgtggagcccttggggggtggtcgggtgggatgtgcgttctccgctcgtggtgatgtcaggagctcctcggagggaacagagcggctgtgtatgcagcctgcaggtttccatacactgaagcttttacctcaactttaaaaaaaaaaaaagaagaaaagatttaaaaaaaaaaaaaaa

SEQ ID NO: 16711 - DNA, 208 bp, Homo sapiens
acgggccaggacccctccacatgcacctgctagtggggaggccacacccacaagcgctgcgtcgtggaagtcaccccatttccccagccagacacactcccatgacgcccacagctgcccctttgcccccagctcagtcaagccgccacatgcccacaacctcaccagagggagaattatgtttctaaatatgtttactttgggacag

SEQ ID NO: 16712 - DNA, 333 bp, Homo sapiens
ctggccccgataactgcatcacctcctgtgaccggctcaacttccaccccagttacaacatcaacaggccatccatctgcgattgaggggctggaaactccctctaggagtcctctgaccccagggcctcctggaaaatcatcatccctcatcacccacagtcgcccgattgtgacggcacagactgcgctgccttccctgaaaatattattcgtctgcggagtaggaaaatatgcaaacggggccgtgaagtcctgccatttcacatctaataagtacatgggaaagatgctaatggttgactttgcattaaaaacgttgtcacatcctgag

SEQ ID NO: 16713 - DNA, 441 bp, Homo sapiens
ctgttatcaccagcatacagctgggatcttgcattttctcctcctccacagatccaatacgtcaaggtcgcacatgattcccagaggaaattatgaattacgccatgaggtttatgacgaataaatgaatcacggcaatttcttataaatgagggaagtcttaagaccttccattttttagagacatacaaatttacatccttcccaaataaatgtttcttcttgccattttgagccatcttatttggctaatgtaggataaagaataaaaggataattacttaatgttaatacacagtaatgttattatctatgtattgtagacaatgtgaaaatacatttgacatagaatgaatatttttaatggagaaagactctagttgagaaaaaacattcataaaatggaaaagtagttcacgcaaaggaaaaaataaatgccag

SEQ ID NO: 16714 - DNA, 937 bp, Homo sapiens
gcacctgatatgagctggggaattgggactcaggcctagcgtgtgtcagggggccccagggtctgtgtctgagcccccgttttctccaccgttggtgcttagctgttgggccgtgtctggtattgagcgttataggtgatatgtgagtgtgtgagtgaacgtgatgtggacgagcctgcatgagagctggcggtgcttggagccctgtattcttccccttgaccctgtgtcagcgaggcccctggtccagcccgtgctggccggcaaaggtgtatggccctgtgacatggcgtgtgtccattccatttaggatttagtgtttgggagcccgttcctggttctggtccaacaggtgtcctgggtctggggccaccaggtatgagctcacccacctcatcacagcctctgtgcagcggggacagggcagggcagacggactgaggtgggagctctgttcctccgaccccacctgtctgcctcaagctcccagagcacctgcctgccctgccgatgtgtcctgtttgcttccagggtctctggagggtcgaggaggcagtggccctgcatgggccccagctgagagcagtccactggatgttggagagccaggcttcctaggggaccctgagcttggctcccaggagctccaggacagccctctggagccgtggggcctggatgtggactgtgcaggcctggccctgaaggacgaggtggagagcatcttccctgacttctttgcctgctagcagccaggctgtggagaggaggcgggcggggccggtggatctggagccgtgtgtgtccctgtcgcgtgcttgggcattttattttgggtttgggttgcagctgcaccctaatttgagcgaggcttacaggctgtgagaagaggatagtgaatattaaagagggaaagcagttttcctggaggaagcaa

SEQ ID NO: 16715 - DNA, 1727 bp, Homo sapiens
ccccggtgcagctggcgtccaaagggtgacccagactcgtaaatgatgcccttgtggctggcatccagagggtgccacggggtccttatttattgttttcatctatttgggtacgaagtgtgcaaagtcacagaccttttgcaaagaggtttctagacagcagaagaaaacccctctctcagcgctcatctcacgcagaggatgccaggcagggtgaggatgggggagtagatgccgcttttgcagtggctcgcactgctgtggccactgctgaccactgaggctcccagcggagggtgttcacagccaggtcccgggccacggagctcccttacttgaagttctccttcagcatagattagacgtgatccactttgctttcttgcttctcacctcgcccccttgcacattgcctgacaccctcatattggccagctgtaatctcgtgactatgggactgaggctcaatcttggcttggggtgtttgaatgtctatagcaaaggaattcataatgggaaatctttttcatttgagaaattgtatgatatttattggttgtgtctactgccaacatttatatccaattctaagatttctgaaaaaaaattcttatcccttgctgctcagaaaaagtttacggaaaacaccagttcactaaaagcaccgaaatctgcaaagcctgtcttccgctagaacaacgtctacaaatgtgaagatgatgacttctggcacgcggtcatgagggtggggaatggcactaggagctgatgtttgcctcatttaaagtaggcaagccgagccaactgcagccatcattcattaagttttgggtagtgctctaatggtttgttcactttaataaagacagattttggtaaagtagaatatttttcattctgagcatgtttgtcccaaaaggtgatgcacttaagctgacagtcccttcagtggttttgttaggtcacggcttgtcctgtctggattctgcatctggaagcgctgcatgctctcagaggagcgtgccgtttcccctgtagatggatacttttgttttgttgcctatttaaaaacaattaagtggttatttgcagttatttcagaactccaagtaagtggatggctttgggttctttctgccttggtcccaatggtgttgatgcttctgtggagcgcggacattcccaggagcaggtgcgtgccagccatggctgccagacactgctgcaactgaccagctgccggaagattctggagccactaacattagttttgcacatattttcttgggagtgttacttgaatctatctcaaactgcagaaaaaatcaaaagatcaataattgggagaaaaagagacaaatttaactgttacataattttagatagacaaaaaacatgagtgagtcgtgtacataaggagggaacatggtacagaaggctagaaggaattataggtcttattcccctttcctcagtcctttgaagagaagtacagtctcttgcgattttgtatatatcgtgttcgacacagccgctctctgtcctgtaaatagggaactaaaggctgtatgatttctcaagtgctgagttacacagtcctgagtgagctttctgttaccatactttcacacgtgggctttatttctcactgtatgtttgatatgatattactgtatttattttaagaaagcactaagatgtaataaagtgatgaactaatttgcttt

SEQ ID NO: 16716 - DNA, 430 bp, Homo sapiens
gtggcgttgttccactcggctatcaggccacagcagccccctggtgcggcccgagaccgggcagagtggacctcacctggaaactcaccttcagcgcctcagccctggactgttagaggtgctgcagctgctcctgctctctgatcttattgcttataaactttggtgacggtagtgtgtaaggccgtatttttagcatctgacaggtgtttacaaaaaagtggttgtcgcactgggaagtggagtgatggcctcgtctccagtgctcctctgggctcttgagttgctgcttgaattgccgtgtagacatttgcttggagagtccacttgttatttgacggaggtaggtttcaacccagagttaatgtcaagcatgctaatttaactagtcactcacagatgacttttctttaataaagtcccttttcct

SEQ ID NO: 16717 - DNA, 160 bp, Homo sapiens
gcggagctgggtggctgcgcgagggaccgagtactagagctgcttgcatgcgttactaatacaaacaaatgtgatcaagccacttacctactgaactgctactgttgcctgagaaaaatgtgatttttattctgcttgtatttaaaattgatgaaggaaa

SEQ ID NO: 16718 - DNA, 1073 bp, Homo sapiens
cccaggcccggctccaccctgcacctcacacgagggagctgcccctgggtgggcggctcggggctgctggggtttccgaggaagtggggccagggcgtcaagggagggctggtgccttcggagcctcccactgccgaccgcacagctccctctctgggggctgagggacccacctggcccctcctctgacacagggctggcccgccaggtggcctcccagcaagccagccttttttgtaagcaaatttctcccctttattgaccaattaactgagcacttgctgctatttctagacatgaaatgtcaccttgctgaggcccagcccagcccagcatagcccgagggctggaaaaacgctttcatctctaaaactgagaaatcatcataattgtgctttcacttcccaggctccatgtgtcttggagccgtcaccccgaggctccctctttaggtcggagattggccttgcctgtcgaggcaagaggctgcagaggcggggacacacctgtgtcctccgggagaggccccctcctctccccagaccacagggggcctctctgcctccagccccaccttccccgggagaagctttccccaatccccaggtctctagatcattctgttctcgagtatcctgtggaggaggcaaaaatgcctggcgccccttctctccaagctcaattctctaagcccctcagggtctcctcctcaccccaccccaggcccttggtgtccaggctgcacccacagatgtctgttgccaaacagcctgccctccctgccggagccggctctgccagccccagattgggaagtctccccgctggagaagggtggggctcctctgagcctgccctgcctcctccatcagatcctttgggaagaagtttctgggagatgcccgcagctgtgcgtgccccagacacaaaggctggcctgtgtgtaagtcaaagtcactcccgcaaacctgaatctcgagctacctattggttctgtgaatgttctgtgtcttttatttattctcgggtgatcagctctttccaagacttcaataaatttgtcagttacagtc

SEQ ID NO: 16719 - DNA, 2391 bp, Homo sapiens
gtgcccgggtgctgccagccacggcggaagctcccttggaggcagccctgccccgtgccacctgcagctttaatatttatgatcagggattttataaacatgcgggcctggtttcacatcggatggcaccttttggcttcaaagtcctggttttacaaacgctcttctaacaagggaagaacacggggtaattttgtggggatatttgcattcctggcgtactcaagtctgttcatgctccttttgcaggtcttacagcaaaaagacttctgtatttttactcttctagatgtgaaaagagggtgcagagtccaggccagatagtcttccccacacactttcatctcgtttcctccactccgccccatcctgcagggccttgtttttgtatttggagaacctcgcccatcccccccgcggctcctggctcccccccactcccctcgctccccctccccccgctccccccacgccccctgctccaggctgccaagtgttttcctttagccgggcggggacagacagagccggaagcgcagtcggcctctgcagcccctccaagcaagtgctccagggactatcctgtgtttgtagctgcttccctagggcaggttcctgagggctctccttgttcctccgggtgttcgacaccagacgtggggatttcaacaggggaggagccaaggaattctgtggctgtgctgcgtttcagaaaataacccccagaggccttgggctgtggacctgggggttggaaggatgggggctcatttaaccctcagaggcagcgcctttgtctgtctatctggtgacaagagagagacaagtaaatgggggccgttgggacggcgggtgcctggagggcagctctgggctcagcgggcagtgcttagagcacaggcccctctgttgggggatggggaggagagcagtctgcccttgggagcgtaggccccagggagacttctaaagccccccctgtcgtctgctcttcacccagcaccacagaggcacctgctgcacacacaagcatctcactcggcccacggagggggccaggcttcctttgcctgaagctgttttgggaagggtctccacacaggcactgatctcccaagcttttgtcatgatgtcttttaccatttgataattttaaacattgtttttaaacccaaaacatttagtggtccgttgcctctgaagatgtaaacaaacaaatacactatttctgggaacatttatattgagattctttgtggctattggtgtgtctcacaggcaaaatttgatttggctaaaataggctcagatgtatttgtgtgcccgtgtgtgtgtgtgtgtgtgtgtgtgtgtgtgtgtgtgtatgagagagagagagactttgacggttgtagatattttttccgctttgcctactttatgttgtataatcatgtgtttactaacaagttgatgacatggatgtattcataagaccatgtaatattgatgtgattgttgtcgcttgagaaaaaaaggcaacagctgattctttcaacaactgtcacagaatggctgggctgagaacgctgcccagggccctgcagctggcgggagaggtgtctggtgggagcggtgtctggtgcgtcagcctgctgcttcgtgtctcactcgagagttgcttctggtttcacactttttaacccctctgtgctttagcagccgtgaccttgccttcattgcttcatccagtgcaggcctgggttattgaagacaccaaagtgtttctcttccagtttgaaaaccaggcaggtttacacgtgggtttcagtgtatttgcctttgaacccttcaaactaaactttagccttttggctggtgttgaatgtctttagctggggtgacctggagtgacctgggacggtgttgtggtttaccgtctccagcttcagcctttccagaaacccttgtggagggcagtgttggctgcaggtttcatcatattgcagtttgaggtcaccactatttggggaacaagcttgcgtcctgctgaggggcaggattttcagcagagcgtcggtggggctgggccgtcgtggaggtggccccaggagtcatatggccatactcagacacaccttgtgtggcctgctcagagctggatgccacctttaggcaatgtttagagtctattttctaaagttttaagtattttaagaggtattgagactaatgaatataatagttcagtaatttaaatgcttatttattttcagtggaaggatttttattaaaaagaagctaattgacatggaaatgtcagtgaaatttcttacctgcaaggaaagtgaacattttgtatttaagtaaactataatgtgcacattttaataaagaaatctgacatttgaa

SEQ ID NO: 16720 - DNA, 346 bp, Homo sapiens
ccgcagcagcgcaggccccgaccagggcacacccaccggcccggcctcctgccacccgggggtgccgacgccctggggcgcagacttccccgagccgtcgctgacttggcctggaacgaggaatctggtgccctgaaaggcccagccggactgccgggcattggggccgtttgttaagcggcactcattttgcggaggccatgcgggtgctcaccacccccatgcacacgccatctgtgtaacttcaggatctgttctgtttcaccatgtaacacacaatacatgcatgcattgtattagtgttagaaaacacagctgcgtaaataaacagcacgggtgacccgca

SEQ ID NO: 16721 - DNA, 223 bp, Homo sapiens
gacaagcactttctcagaagcccgtggccctgctgacgagagacagcccacccccagcctgcaagagaggcagccagaggccaggtatctgctggccgctgactgaccaggtccgcagtgaacagaggcgggcctgccgactgactgtgtggcatggagcatggctgttccccaagtgcacacctgaacacttggaggaataaagttctgtttttaattgtgg

SEQ ID NO: 16722 - DNA, 865 bp, Homo sapiens
ggacccctgggtgttctcagcatgaagctccgtgtataccctgaggtcaccaccgctcgatctaaatgtgcagttgtgtccttaaatatgcagtcttcacccagagtaaagtgttgatcgcaagagtccagtgtcgtgccctcagccagttcttggccaccacaatgggagcagccctggccgagttgtctctgtggtttctatgcagcccttcttggcgaaattcctgcgatcttatagattctaatgagctcttggaagacattgtcataaaagccagtgattttaagaaaaagagtggttctggaatcaatgttttccagtcccatcccagaacatcagttgtaagataagtacaattggttgtccttgatttcataagtagaacaaacactaaatgtgcctctgagatggccaccccgggcagggacctgtgccttccgccgatgctcagggctccctctggctcccgggtcactcttgtggccccagtgggtggtccctgcagtcatggcctgagtgcgcaggggccaccgcgtggctgctgctgtcctcctccgggacccacggggaccaaggtcacacgttccgtgctgtgaagctgtccagatgtgcctctttggctgggggttctggtggacgtttcaagtggcattttgtacaatgcaggttagaattcaggaatttcaagtatgtgcccgggtctgtcaggtcccagttgcctttctgacggcccccctcagagggacggcgatgagcactaaatgcttttttgactattttcctatagattttttttaaaacttttttttcctcctgttccaattgatagctttcttatttaataaattctgtagttcaccgc

SEQ ID NO: 16723 - DNA, 1052 bp, Homo sapiens
agtttgctgaacgaggactcacagctgcaacgtggggtgattgtattgatcaaaacccactgggaaggacaaagagtttgccgcctttcggggatccgagggactgtggcgaccgtgcctctgtgccagcgtcccaggaaggaagccaaccctgagcgagcctgtcctctgtggcaggtccacacggtgtgggtgggcagggcttggacccccgtctccatggcaggtccatacagcatgggtggcagggtttggacccgcccagcagcaccacggaccccagccactctcgggggcagacgtcagaatccgttcctgagcagctcctgtgccctgggggcagtcacagagccccccaacacccccgtgctctgcaccagcctctccctccacacccgaagcaggcgtccatctgtgtcctcctggcagcccctcaaacacacaccaccccatgtcacacgggtatccagagcaaggctggatctgggctaggtgacccctggggcctcagacctctgagtgggccccagagcccagctgaggaagccacacagcctccaggacgtggcacggttcccctccacttggctgcaagtcgcctgccatggggcgaggaggcctgcaccccagtataagggcctccccagctgagtaagaagctgcttcccctcctctcataggccaagcctattgtgtgaaaccatctcatggtcttggtgacgtagaccatttttgaaaccgtctcatggtcttggtgacgtagaccgtttgcttctttaactccagccgcggaatgacattagtggaaccgggctagggaactgctggaagttcaggatgccaccaccttgaacacctaggccagggatccccaccatgtcccgggtttctttcttcgagagtatagaaccgttcattcttgctttgtgtcccattccatctcttgaaaaaatgtagtctttgaatgtgtgaaaatctagggacattcaatctagtcttttaaattatttttccatatttatatttttaaataaatgcatatattgagtctt

SEQ ID NO: 16724 - DNA, 1627 bp, Homo sapiens
acggcgcgccccacgagaccccggcttcctttcccaagccttcgggcgtctgtgtgcgctctgtggatgccagggccgaccagaggagcctttttaaaacacatgtttttatacaaaataagaacgaggattttaattttttttagtatttatttatgtacttttattttacacagaaacactgcctttttatttatatgtactgttttatctggccccaggtagaaacttttatctattctgagaaaacaagcaagttctgagagccagggttttcctacgtaggatgaaaagattcttctgtgtttataaaatataaacaaagattcatgatttataaatgccatttatttattgattccttttttcaaaatccaaaaagaaatgatgttggagaagggaagttgaacgagcatagtccaaaaagctcctggggcgtccaggccgcgccctttccccgacgcccacccaaccccaagccagcccggccgctccaccagcatcacctgcctgttaggagaagctgcatccagaggcaaacggaggcaaagctggctcaccttccgcacgcggattaatttgcatctgaaataggaaacaagtgaaagcatatgggttagatgttgccatgtgttttagatggtttcttgcaagcatgcttgtgaaaatgtgttctcggagtgtgtatgccaagagtgcacccatggtaccaatcatgaatctttgtttcaggttcagtattatgtagttgttcgttggttatacaagttcttggtccctccagaaccaccccggccccctgcccgttcttgaaatgtaggcatcatgcatgtcaaacatgagatgtgtggactgtggcacttgcctgggtcacacacggaggcatcctacccttttctggggaaagacactgcctgggctgaccccggtggcggccccagcacctcagcctgcacagtgtcccccaggttccgaagaagatgctccagcaacacagcctgggccccagctcgcgggacccgaccccccgtgggctcccgtgttttgtaggagacttgccagagccgggcacattgagctgtgcaacgccgtgggctgcgtcctttggtcctgtccccgcagccctggcagggggcatgcggtcgggcaggggctggagggaggcgggggctgcccttgggccacccctcctagtttgggaggagcagatttttgcaataccaagtatagcctatggcagaaaaaatgtctgtaaatatgtttttaaaggtggattttgtttaaaaaatcttaatgaatgagtctgttgtgtgtcatgccagtgagggacgtcagacttggctcagctcggggagccttagccgcccatgcactggggacgctccgctgccgtgccgcctgcactcctcagggcagcctcccccggctctacgggggccgcgtggtgccatccccagggggcatgaccagatgcgtcccaagatgttgatttttactgtgttttataaaatagagtgtagtttacagaaaaagactttaaaagtgatctacatgaggaactgtagatgatgtatttttttcatcttttttgttaactgatttgcaataaaaatgatactgatggtga

SEQ ID NO: 16725 - DNA, 609 bp, Homo sapiens
cccagaccacggcagggcatgacctggggagggcaggtggaagccgatggctggaggatgggcagaggggactcctcccggcttccaaataccactctgtccggctcccccagctctcactcagcccgggaagcaggaagccccttctgtcactggcctcagacacaggcccctggtgtcccctgcagggggctcagctggaccctccccgggctcgagggcagggactcgcgcccacggcacctctgggagctgggatgataaagatgaggcttgcggctgtggcccgctggtgggctgagccacaaggcccccgatggcccaggagcagatgggaggaccccgaggccagacgcacactgtccgagccctctgctcagccgcctgggacccaccagggtgcagctgggctccagggtccagcccacaagctgcatcaggctctctgggagaggaggggcctggagggccaggagtcccagactcacgcaccctgggccacagggagccgggaatcggggcctgctgctcctgctggcctggaagactctgtggggtcagcactgtactccgttgctgtttttttataaacacactcttggaagtggc

SEQ ID NO: 16726 - DNA, 1358 bp, Homo sapiens
gagccagcgtcctctgctcttccctttcgacgcgtggtcctcccagacccgaggagcgttgttccagatgtcaagtggagaccacggcttgttgagaggtgtttggtgactctaggtcattgacagtgtgaaaatcaagtggctcaagggatcctttatgatcacagaaagatgggggaaggaggatacaggctgaccgggtggcgagatgtcagccaggccccttccccactgtcttctggagcacactgcaggctgctgctattccctgtctgctgtgaaacagaccacaggccggcccaacgcagtcctcgccgtgtgccttgcctctgccctccacgccgccgccaccctccgcgttcctttacatcctgcactttctcaggaagccgttcgcatatccacccaacatggaggagcccccatgacgtgccaggcagcgtgctggcccctgcggctgcgttagggaacagaatcggcaaacgcagtcccagagttgatgcctgatcaggagaagccaacttcagcagtgtggtcacctggatactcgagtatagaccctagatcacctggatactcgagtatagaccctagaagtgtatctaggcgcggccagggccccacaacagcaggtctgactcattccatccagggcagcatcagggagagcttcctgggggaagtggcatttgggctgacctgggaagggtggtgggtgttaagtcagtttgggtggggctggaggagcaggggtgcatccccagaacaggatgtgacttctgaaaagacatcagagtagagaaaatggtttctcaaggagattggggacgccagtatcagaatggcggcggggagagccacagaggagcaggagggggcccaccagaccacggcacctcgaaggctgcggtgaaggcttaggtctcactcaaggggtgatgacgggaggttgtctgagatgaaccccccaactgaatgaatggaccttcttctggccaaggggatcccaaagaaaccctgaacccgagtcctcagccatgacggggtaaggggtcagcccctccttctggcccgagaagagatcagagattggttctgggcagtccatggagaatttgctcagctggaccagtacacgcttctcctttcatgaatattcatgactcctcctgaagcttattgaacatctctatttggccatctccttcagcgtaaattcctgtcccctctgtccctcccctccaagtgtctgttccaggcttctggcctgaggctacgcttcctagcctgtcagaagggctgccctgctggctgcaatctcttatgagaaataaagctctcctgtgtgcaaaaaagta

SEQ ID NO: 16727 - DNA, 123 bp, Homo sapiens
tgagtgctgcgtccccagtagggatggcgcccacagggtcctgtgacctcggccagtgtccacccacctcgctcagcggctcccggggcccagcaccagctcagaataaagcgattccacagc

SEQ ID NO: 16728 - DNA, 110 bp, Homo sapiens
tggagttcctgcctcagaccacaaggttcggagcgcccgcccacccctgcccctcctgggcaccctgcccaccaggtcacctgcacctgctctgaataaactgtgaagtc

SEQ ID NO: 16729 - DNA, 149 bp, Homo sapiens
gtggagccaaagcagcaggcgcctttgcccctggagtcaagacccacagccctcggggaccacctggagtctctccatcctccaccccccgcctgtgggatgccttgtgggacgtctctttctattcaataaacagatgctgcagcctc

SEQ ID NO: 16730 - DNA, 165 bp, Homo sapiens
acacaaagcctcgaaatcagtgcgctccagctgatctcgttccgccggttccccttggccgccagttccgttctcctcacgggccgaacggaacaaggggtccagcttgcgggggaccctccccagcccattcctgctgtcaaacaaacaaaaccttgcaaagcg

SEQ ID NO: 16731 - DNA, 90 bp, Homo sapiens
acagggaggctacccgctcccagctggggttggtgagagtgggactcgggggaagaagatggccctgggggtcccctgttctctgaattc

SEQ ID NO: 16732 - DNA, 492 bp, Homo sapiens
ggtgtgctgggtgcactggagccaccgggaccccttgaggacatcgccaggctctgtggctttttcccgagcgggagaggtggagatgcttatagcagttacgccttaggaaggggacaaccaggccccgccacacgctcacacacaaacctgctcacgcagctgtgatgcttggcacggggtggccagtgcagatggagcccaaggccccctcggcctcctgggcaacttggggtacacaggatactgggggtgccgctcctcactcaaccccaggctaggggtacacctgacccagctggcctcggcccggggcaccttcggctggtcctgtggggccctggacggtggcccagtggtggcaggggctgctcctggctgtggttgtgcgcccggggcttgggagcggccggtcacgctgctgtgggcccgagtgtgttgcatgtccacgcaccacccgttcagggccctgaataaacagttggcaacagc

SEQ ID NO: 16733 - DNA, 73 bp, Homo sapiens
cgccccaccccgcgtctgtcgcccaataaaggcatctttgtcgggagtgagggtgtcctgacatctgaagggc

SEQ ID NO: 16734 - DNA, 695 bp, Homo sapiens
ccacccagagctgggccagggaggacacgctccactgaccacccagagctgggccagggactcaacaatggggacagaagtcccccagtgcctgccagggcctggagtggaggttcaggaccaaggggcttctggtcctccagcccctgtactcggccatgccctgtggtcactgcggttgccgcccctaattgtgccaaaggctgacccggcccgggctgcgtacacccttgccctgctttgccttaaagcctcggggtctgcccggcccctcgcccctgcctggcactgctcaccgcccaaggcgacgccggctggaccaggcactgctggcctttctcctgcccggcctcggaaccagcttttctctcttacgatgaaggctgatgccgagagcgggctgtgggcggagctgggtcagtcccgtatttattttgctttgagaagaggctcctctggccctgctctcctgcagggaggtggctgtcctgcgggaagccatcagcttgggccagctggcaggtggcaggaatggagaagctgaccctgctggccaggcaaggggccagaccccccccaacccccagctgccatcgctctcccacccagcttggccccctgcccgcccacctccctgggagccgggcctgtacatagcgcacagatgtttgttttaaataaataaacaaaatgtc

SEQ ID NO: 16735 - DNA, 536 bp, Homo sapiens
gatccgctggccgggggaggtgggtgtgggtggaagggctgggtgtcgaaatcaaaccaccaggcatccggcccttaccggcaagcagcgggctaacgggaggctgggcacagaggtcaggaagcaggggtggggggtgcaggtgggcactggagcatgcagaggaggtgagagtgggagggaggtaacgggtgcctgctgcggcagacgggaggggaaaggctgccgaggaccctccccaccctgaacaaatcttgggtgggtgaaggcctggctggaagagggtgaaaggcagggcccttggggctggggggcaccccagcctgaagtttgtgggggccaaacctgggaccccgagcttcctcggtagcagaggccctgtggtccccgagacacaggcacgggtccctgccacgtccatagttctgaggtccctgtgtgtaggctggggcggggcccaggagaccacggggagcaaaccagcttgttctgggctcagggagggagggcggtggacaataaacatctgagcagtg

SEQ ID NO: 16736 - DNA, 301 bp, Homo sapiens
cctggaggcagacagacgcccacctgctccccgacctcgaggcccccggggaggggcagggcctggagcttcccactaaaaacatgttttgatgctgtgtgcttttggctgggcctcgggctccaggccctgggaccccttgccagggagacccccgaacctttgtgccaggacacctcctggtcccctgcacctctcctgttcggtttagacccccaaactggagggggcatggagaaccgtagagcgcaggaacgggtgggtaattctagagacaaaagccaattaaagtccatttcag

SEQ ID NO: 16737 - DNA, 556 bp, Homo sapiens
gggccgacgggggcagctgccccatccctcccccaacccctgtatccccaccccgtactcccacccctcccacaacccctgtacctcccacccctgtatccccacccctccacccacccctctcccaacctctctccccgcccctgtatcctgcattcctccacccaccctctatcccccaccgctccaccccaccactgtcttctccatccttccaccccaccctcagcgtctctgcccctaaggcagcccaggaaataggaactgagactctggtacccacaggagcctgggtgggcaaagagcgctcaatccagctccttgaacccctccagcccgcttcagcctgggcatcactgcaggccccgtgctcctcctcctcctcctcagggctgggtctccagagagtggggccttggtcctgagaatcagcccttagaggctccttctgtgtagtctgggtctgtactggggagggtcacagcccacgggctggcagccagcccagcacctacttgtaaaaattttgtaataaaaagtttttcctagagacgtg

SEQ ID NO: 16738 - DNA, 2335 bp, Homo sapiens
tccttgtgggccgcgtgggcccccagggccagcctggcactcagcccttcgagggtgggcgccccatcgcacccaccctctctggctggagacccccggcaggcccaggcacagtcccggagtgggcgccttcctgccgcccttgccagatgggctccccaggcctgcccccggctggtccccgcaccgagcgcttgactccgttttggctcctggtgctgacatgggctggggctctcttgagtccgcatagtccgcagctactactgccgctgtcagtggacagtggggtacccctccatgagttagcgtccccccgtttccagcggtgccgccctgggtcccatcttcagggaaaggcactgcccacgccaggctgcacttccaacaacgggcagcagagggcgcggggcggctccgacgcgggtccaagggcagcttcccgctcaaccagggcaccaggacgaggtggctgtagctcggacggacggaagtagatggagggggtggggacggcctgtaagcggggggtgcctgcctggctggggagccccagggatagcggtcggacttcaggttctggccaaggctgagggaccctggctgcagcggatcggcacgccgggtgggcgagagcttggcctgcatgtgcctcccacagaccctggggtgatggccttccccctcttggccgggacgttgccccacgttgagtcccacacaacatcctgtgagcctggctccccaggagggcccccagacagctcccaggcacgtcataggcaaagcctgttcccccgactcaggatttccaaggcctggggtcctgctcacccccctttgctctcacgcccagcctgtccccaggtttcagctgggagaggccacctccctcagccaaggaaaacgagaacccccagggtacaggaggaggctggggcaggtccccttgggtgtcactccctcagcccctgcccaggcccactcccgctggtgctggagtacgcactggtgggggggccctgctcagcccaacctggagggtcccagtgtcaccagaaccaggggcacggcaacagcatcgatgggttctgcagcccagggcccccgatgcggggtcagtgcgtggggggcgcagggcccccgatgccgatgcggggtcagtgtgtgtggggcgcagggcctccgatgcggggtcagtgcgtggggggcgcagggccccctcgtgtccagggcactttggtacactgtcccacaaggcacctgtctcagaggaggggccctggcaggcagcgtggcaactcccttccggagcccagctccatgctaacctgcccacagcaaccccacagagccacattccctgctgcacctggtctgcaggggtgtcccaggacaggcccaagtcagcccagcatgcagctgccctcctaccctgaagatgggagtgggctttccaggggacataaggatgtcaggcctggacctcctgggcaggaaagggtgcaggtcctgagggcctgtgccccacagccccagcaccaggtggactgcagcgcagtgggtgggccagtggcagccagggagaagccccccgtcagcaggctggggtctgcccaccagggcctccccacgtctgcctttgagggtgcctgccatgccctgggggatcctggcatctttactggactggaagcaggagacagaacagtgtctgtcccggggtgacttcatcaggagaccgcccacatagagctggaccccgcagctgaagcggaaatgtgagacaggctggcacctccggaaaaactgcctttcagccttggtgttccgtgcaaggtgaaaagaaataggtcctcccagtttacagcttgaaatcaggctagtgagtggccctggagaccacgaggggagaatttaaaggccccggctggcagggtctaggtggctggcagaggcacatgcagaccctgcctggagcctgccctaggacgctgggcgggtcagtctccgtgcaggatgtgagcagcgtccctgggctctatccgcgaggtgccagtagcgtgtgcaggtacatacacgtgcgtgcacactgtgatgacacccggaaatgtctcaggatgttgaaatgtgtccttgggggcagaagtgtccccagttgagaatctgccccagaggaacacacccacaccaggcctcaggattttgtgttgatcaagttccaaggaaaaggaacatctcagccgggcgtggtggttcacgcctggaatcccagcacttgaggccaggagttccagagcagcctgggcaacgcagtgagagaccccatctctac

SEQ ID NO: 16739 - DNA, 107 bp, Homo sapiens
gcacaggactggaggggtctcaaggctcctcatggagtgggggcttcactcaagcagctggcggcagagggaaggggctgaataaacgcctggaggcctggccatgt

SEQ ID NO: 16740 - DNA, 95 bp, Homo sapiens
gcggccgcggccgcctggagcgctcgaagcttcccccatgcctttgccctccctttacactgtctgccggcgtcaacaagcgacacagaccgaaa

SEQ ID NO: 16741 - DNA, 158 bp, Homo sapiens
cacatcgcccgcccgcccgcccgcccgccaggcgctgccctgcaggtgctctcgtcctcccgtgccagcccccgcccgcccgtgtcccagaatgcactgctgaggagcatgcccacccccacccccgcagtgtgcagattaaagcaagtcagatcatc

SEQ ID NO: 16742 - DNA, 495 bp, Homo sapiens
gcccagcactgccaggaccaaggctgagcccagctgtgggagtcccggaagctgggcagtagccagggactactgcacccgcttctgccttgtttggcctcactgtatcccacccacccctcctggccctggaagcagctagggtgcctcctgccatcggggccaggtctgggtctcactccccggccctgatttgggagggtccaagggggaagtggggtggggaactgcctgtgggtgagtgccaggggcctgctgggtggtggccatctgcgacccggcagggggctgtgcagattctgcacctggccattccctgtcctgtctcctcagcctgcctcacagtggccatggggtgtcggggtgaagggctgtcccagctacttgtcctctgcaggaccctaagcccctgcccgcagcccacatgccctctgtgatgagtggcgtctttcctgcctctgatgatggactcaataaacagcactggacaaggct

SEQ ID NO: 16743 - DNA, 919 bp, Homo sapiens
cctcaccgaggtgccggagagggagcgctggacaactagaatgttgacctcgagccgaggccctacttgcagcgcaccggaggagaggctctctagtctgaaggcaccgccggcttgcgccgagctgagtgccgggtttccctattccaatcctgtttgaaatggtttcttcagcagggcttaaaagagcagccttcatcctgaaaatgtatttccttttgtttaatgctttgagtagataatcctgaattgaggtcatgaggaggccccccaggccagacagtcctgaacccctctgacacttggaaactgaatataagtaaaatgtccaggtggactctgagtatttcctgtggatcctgggaaagtactgttgcacaaaggctgcaaagctggactcaggaatgtcctccaaccagcagcgctgacctaagagctccctgtgccgtctatccagaccagacttcggtagatgcctttgttagatctatcacatgtaaacgagcttgtatctccttccctgtgccacgagagagattggctttttattccagtctaggcagagacagaagaatgttgaataagagcacgattagagtcctgtctggttatctgttgcccaagaaaagaactctgctgtccaggcactgcttggcttactatcccagcaaagactgcagttttgtggacttttgaccaccttgggctggcactcttagcacacctgagacagatttaagcctccctaagagactgaagagaggaacaggtgtcagatactcataggcactgagatctacaaatgggaagcttgtgagtggcccatctttgttggcctacgaactttggtttgatgccagtcaggtgccacatgagaacctttgctgagatgcaaataaagtaagagaatgttttcctg

SEQ ID NO: 16744 - DNA, 172 bp, Homo sapiens
tagcgcctgcctgcccgccactgcccgctgagcctcgctcgctgcttcttcagggacccggccctgccctgccgcccgctgacccttccttccccaccatggcttccggccccaccccgagtggcattgtcgctgcagccaactttgccattaaaactctttgccaaagttt

SEQ ID NO: 16745 - DNA, 115 bp, Homo sapiens
aaatgctttaatggtggtgtctgtacagcatggatgtggacagggaaaacagcaagtgcacacagtgggacaggccacaggacaggctgggagtgaataaagagttcacactgct

SEQ ID NO: 16746 - DNA, 1101 bp, Homo sapiens
tgcccgccgggaccccggaccccggccctgcgcccgcgtcgtctctgctgtaccttcccgccaactacctcggtgcgcgcccggctcgcaggccccgccagaaggcccgtggccacggcgaatacggcgcgtgcgtcccggccccagggtccggcagccccgccggccgagcgcctccctgcggcctagccgggcccggccgggccggagcagcttcccacggcccccacccgctcgcctgcccgccgcctcgcgggtgggggcggggcgcgggctccagccccttttgaaatttgagtctcgcaaccagcaagttcggaatcccgagataccggatcctctgcgcaaaatgttttctcccgaaggtgaaaggcgggcggcgggagccgaaggcggactcggagcgctccgccgccgccttcaggacccgcccgcaggcccgggacgcgccgatgccggctgcagccgaggagcagccccgaggtccgaggtccgcgccgctggcgcgcggccgaggagacgctcggctgttcgctgttgctggtgttctaaactatttatcttgtgtgtgtacatttgtgggtggagtttgtgcgcctggtttttttgtttggaaaacactgcgtggtcaatgtggttatgggggggagtgatgcatttttttctagtcttaaaactaaaaacttgagtctaccatttcttggttgcactgaaaataccgcccagcctgatggtgttcccgtgctgtccctcccccttcccttctccccgcgtctacctccccaccccgttctgttccccctccctccttctccctctccctcaaatccgtgagttttggaagccccagggcctctctcccccgcccctcctggatgaggccaccatcccccaaaccggcttgttttgcagtttccccaggatcctggaagctcgctggcgctcgagggtggcggggacacgggggggtgggtgaaggttcgttaccttttctagtgcgttctatcatagttaacggttgcacacttttttaaaaaaagtaaatggatttgccacaattaaatgtcataacatttatgacagaatataaaatattaacat

SEQ ID NO: 16747 - DNA, 54 bp, Homo sapiens
ggacagccagacaataaacatggaaagtgcccgactgctgggcccatggccgtg

SEQ ID NO: 16748 - DNA, 549 bp, Homo sapiens
tgggaaggcggaggtgggcccccacagagcccacaggcagctgcgtcccggatgctggaggcttcctgagccctgagcgccgtggggccttgctctgtggctctgcccacggtcaggtgacagccacctccagggcaccgtcagggtggtgctggccacagaggctgcatgacctcccctcccggcgtccctcccccaacctccttccgcaactgggcttccagggccgtaggtgcctttctgcacacaggccgccaggactcgtggtgtctccaggctgtgtgactgcagggccacatgctgcctgcaaacagggcaagaccacggaggcacaggggtcctgctcctgatggggcctcaggaggggcggagaggggtggaagggagggagctgccccacctggacccccgctctccctgctgttgtctgagcagatggatggagtccaggcctgggggcttctgctgggccagcccggcctcccacacccacttggagggtgagactgcagtgggggttgtttttattaaaagcatcatggacacagc

SEQ ID NO: 16749 - DNA, 1169 bp, Homo sapiens
ggggcagaggcctccgcccagtcaccatcaggccactccctctgcaccgggacctggggctgggccgcctcgtgctccccgggactgtgtggctccggtctcgcctggagccacttcagggcacctcagacgttgctcaggttccccctgtgggttccggtcctcgctgcacccgtggccgcagaggctgcagtccctgggggccgggaggatcccgccctgtggcccgtggatgctcagcggccaggcactgacctgccatgcctcgcctggaggctcagctgtgggcatccctccatggggttcatagaaataagtgcaatttctacacccccgaaacaattcaaagggaagcagcatttcttgttaactagttaagcactatgctgctagttacagtgtaggcaccccggcccagcagcccagcagcccacatgtgttcaggaccctccctgcccaccccctccctgccgtatcgatcaccagcaccagggtggcccgtgtgcgtggggccagcgtcgccgggctgcccagcctggctctgtctacactggccgagtctctgggtctgtctacactggccgagtctccgactgtctgtgctttcacttacactcctcttgccaccccccatccctgcttacttagacctcagccggcgccggacccggtaggggcagtctgggcagcaggaaggaagggcgcagcgtcccctccttcagaggaggctctgggtggggcctgctccccatccccccaagcccacccagcactctcattgctgctgttgagttcagcttttaccagcctcagtgtggaggctccatcccagcacacaggcctggggcttggcaggggcccagctggggctgggccctgggttttgagaaactcgctggcaccacagtgggcccctggacccggccgcgcagctggtggactgtaggggctcctgactgggcacaggagctcccagcttttgtccacggccagcaggatgggctgtcgtgtatatagctggggcgagggggcaggccccccttgtgcagagccaggggtctgagggcacctggctgtgttcccagctgagggagggctggggcgggggccgggcttggaacgatgtacgataccctcatagtgaccattaaacctgatcctccaccgcg

SEQ ID NO: 16750 - DNA, 440 bp, Homo sapiens
aggcctctgctaaagagcccggatgcagcgtcttccgtgggactgtccccaaggctgaggctcctgccaagtcctaggggcctctgtacctgccctgctggaagccctgacttccccggggccccaggctgtgttagggttctctgggcctcttctttgtaccagcagccctgcatacagggccctgtgagcccccctgcagtcctgtgaggcccctgaagctctgtgaggcccctgaagctctgtgaaccccctgcagccctgtgaggccccccgaagccctgtgaggccccccgaagccctgtgaaccacctgctgccctgtgaggcccccaaagccctgtgaactgcctgctgtcctgtgaactgcctgctgccctgtgaggtgtgggagccctgatgctgccgtgtgatgtttcaataaaggtggatctcactgtt

SEQ ID NO: 16751 - DNA, 330 bp, Homo sapiens
gcttgaaatcatgaagccccttcccacaaggaaaccaggagggagactgcgagtgagtgcccgggaccacctcatcagagatgcttactgcagccctgcaggtgcctgtgcactgatggaatccacagtgtagtcagaaaagctgttgacttctcttaaatcagcttccctgctgggcccctgaaagtggactgggtgattctgtctggcagagagtggggaaaagacgcggtttccagcttgcagatttgttaagtttctcaggcagattttgactttcagcctttcatacttgtttaagcaactatttgtattaaatgaagttttttg

SEQ ID NO: 16752 - DNA, 464 bp, Homo sapiens
cgggcaggggagccacacatactcacagcccccgggctctaccctgggcacagcagagacagactggtggttgaacctggaggtgccaaaaaagccagctgcgggcccaggacagctgccgtgagactcccgatgtcacaggcagtctgtgtggttacagcgcccctcagtgttcatctccagcagagacaacggaggaggctcccaccaggacggttctcattatttatatgttaatatgtttgtaaactcatgtacagttttttttgggggggaggcaatgggaagggtagaaattacaaatagaatcatttgctgtaatccttaaatggcaaacggtcaggccacgtgactaaaaactgtcctgttgtcgaagcttctcccctgggccgccgggagccccgtggagcgcggcctgcacgggagttgtgtccacaaaggcaaagtaaaggggtggaatcatc

SEQ ID NO: 16753 - DNA, 69 bp, Homo sapiens
agggcagcatttgggcagaatatgtgctggtcaataaatgtgtcagaaaatgagtaattttctgactgc

SEQ ID NO: 16754 - DNA, 761 bp, Homo sapiens
acggagtttcgctctcgttgccgaggctggagtgtagtagtgtgatcctggctcactgcaacctccacctcccgggttccagcaaattctcctgcctcagcctcccaagtagctgggattgcaggcgcccgccaccacgcccggataatttttgtgtgtttagcagagacggggtttcaccatgttggccaggctggtctcgatctcctgacctcaggtgatccacccgcctcggcctcccaaagtgctgggatgacaggcgtgagccaccgcgcccggcctatacctcattttctacatgtcgcttgttggagctgctggttcaagttcccagccagccaatggatgccagcaccatttttactcccctttcccaagcaaatcgtgcatttttgtctaacgagagacatcagtttctcaggatgatcctcaagaacgttatggagtccatgttgcaataggttctctttgggacctaatgactcattttccaaaaatccgcttctacttttggtacccggttgctacggtgaaatgaaggtgccccgcatccagaaagacgcactcctggaccacaaccggcggctacctcagccccacggctctgcaggatcagggctcgggcaggccccgcggagatgaagaatttgcagggagcctccctgacttccgtcggctgtgaatccttgtctgtcaggggcgtatccacaaaatcaccgaattcatacagatcgtttaaataaatgaacatcattaaagtc

SEQ ID NO: 16755 - DNA, 2187 bp, Homo sapiens
cccgccgcgcagccccccgcgcgcccggactcccgggctccgcgcaccccgcctgcaccgcgcgtcctgcactcaaccccgcctggagctccttccgcggccaccgtgctccgggcaccccgggagctcctgcaagaggcctgaggagggaggctcccgggaccgtccacgcacgacccagccagaccctcgcggagatggtgcagaaggcggagcgggtgagcggccgtgcgtccagcccgggcctctccaaggctgcccgtgcgtcctgggaccctggagaagggtaaacccccgcctggctgcgtcttcctctgctataccctatgcatgcggttaactacacacgtttggaagatccttagagtctattgaaactgcaaagatcccggagctggtctccgatgaaaatgccatttcttcgttgccaacgattttctttactaccatgctccttccttcatcccgagaggctgcggaacgggtgtggatttgaatgtggacttcggaatcccaggaggcaggggccgggctctcctccaccgctcccccggagcctcccaggcagcaataaggaaatagttctctggctgaggctgaggacgtgaaccgcgggctttggaaagggaggggagggagacccgaacctcccacgttgggactcccacgttccggggacctgaatgaggaccgactttataacttttccagtgtttgattcccaaattgggtctggttttgttttggattggtatttttttttttttttttttttttttttttttttgctgtgttacaggattcagacgcaaaagacttgcataagagacggacgcgtggttgcaaggtgtcatactgatatgcagcattaactttactgacatggagtgaagtgcaatattataaatattatagattaaaaaaaaaatagccgtgcactcttgaccccgtcagcgtccaacgtggaaaaggcgttacctcttctcccagcgctggccgcctggccactgagggccctttgcaaaaatcacgggtgtagagatggccctgggcgcgctgggagtgtggttgtgtttctgaaggggataaaagagggcacggtggtgccaagatatcagtttggtacctgagctgtttctggttgggaagcgtaaaagccagggagagatccagagagttttcaagtttttgcagatgtaggtggttccagcttttctttctcccctactccatcttctgcgttcccccagttcttttatttctttgttttttatttttgagacagagacttgctttgtcgcccaggctggagtgcagtggcgcaatgtcagctcactgccacctccgcctcccgggttcaagcgatgctcctgcctcagcctcccgagtagctgggactacaggcacctgccaccacccccggctaattttttgtatttatagtagagacggggtttcaccgtgttggccaggctcgtctcgaactcctgacctcaggtgatctgcccgcctcggcctcccaacgtgcccccagttttataaacagcagatagcaacttgtcgtcacagctggcatgggctggacagttgcttgaaatgacctaaccaaaaacattcaagggttctgcccccagatttcgggagatccacgttccatgttctgattggttttctgggaacacagcaaggggtttggtgacctccgagaagatccatctgcatgattggcattagttaccacagcctgcccagagagaaactatcttctcccaacatttactaacatccactggtcaactctcttatttccataacacatttgcatctttctggattcaagcttggtggttttctttcctaacttctgatttagatacttctccctgaggtggggataaaagaaaaaaaaaaacaacttctttttttcttccgcataacactttctatcttgtcactgagctgaactgtagatccatttggacccgtctcatttgtatcttctgatattctttatacaaaccaaaagtccccttcaacattttttatgtcaaaatgttacaaccgctgtaaaatgacggagagagagagaaagaatcccagacattaacggtattagagagtttgcctcattcatccatttttcttaaaagctggaaattaaaaaaaaaaaagagagagagaggcttt

SEQ ID NO: 16756 - DNA, 581 bp, Homo sapiens
tctcgactcactgcaacctccgcctcccgagttcaagcgattctcctgcctcagcctcccgagtagctgggattacaggtgcccaccaccatgtcaagataatgtttgtattttcagtagagatggggtttgaccatgttggccaggctggtctcgaactcctgacctcaggtgatccacccgccttagcctcccaaagtgctgggatgacaggcgtgagcccctgcgcccggcctttgtaactttatttttaattttttttttttttttaagaaagacagagtcttgctctgtcacccaggctggagcacactggtgcgatcatagctcactgcagcctcaaactcctgggctcaagcaatcctcccacctcagcctcctgagtagctgggactacaggcacccaccaccacacccagctaatttttttgatttttactagagacgggatcttgctttgctgctgaggctggtcttgagctcctgagctccaaagatcctctcacctccacctcccaaagtgttagaattacaagcatgaaccactgcccgtggtctccaaaaaaaggactgttacgtgg

SEQ ID NO: 16757 - DNA, 223 bp, Homo sapiens
gactggggttcagggcttgtgggggtctgcctcaatctccctggccgggccaggcgcctgcacagactggctgctggacctgcgcacgcagcccaggaatggacattcctaacgggtggtgggcatgggagatgcctgtgtaatttcgtccgaagctgccaggaagaagaacagaactttgtgtgtttatttcatgataaagtgatttttttttttttaaccc

SEQ ID NO: 16758 - DNA, 922 bp, Homo sapiens
tgacgggcacggcctccccacggcctgtccgggaaagaccaggacctgctcgagcctcctggccgctccttggccgctctccgtccacccctgcaaagccaagacccttctgcagccacgaatgtccacggagcccgccggcaggaaggaagacaccatgctttagagatccatctttctccactcaccgcagcgtacttggcacttcagtttcaaacacgtagtcctttaaaacttgatccgatagctttaatgcggccggtcctctctcagtcaggaaaattgcacagaccgacagtcgtgaggatggcagagctgctgcattcccccacacggggatttctgtgtctgcttggcgacctccctgcgtgcacggcctaggaggtgcacgggccaccatagtcacactggcactgaaaagaaagcgttgccctggtgattctttcccccccgtttgtaatgttaactgatcaggaagtgcagtttgggtgggatgccgaatcgtcgtgctgacattgagtcacggatgaggaaggtacaagtcctttaagatcaaaactcaaacgggccgttctttctaaggtgtcggtatgtggggagtggtacaaaatggtctgatgctccttcaaaaacattcactttttacaacgtcaaggaattaagcataaaaaagattggttaaaagctttggtttctagtaaaggttagtgtgtgtggtttttttaagaagctgttttgctaaattatttttacttggaatgtttcaaacagatttcaggctgcaaacttgttttataatcgtttgcttctccaagtgaagctcagaaatacctaaaaatagctgtaacgttcgcgttaggaaagatggtgtttattccagtttgcatttttatggtgaaataaaatccttttccaatgaact

SEQ ID NO: 16759 - DNA, 66 bp, Homo sapiens
ctgtttcttgtgacctggaactaacgtcaaagcacacaagacataataataaagacatgtacctcc

SEQ ID NO: 16760 - DNA, 503 bp, Homo sapiens
aagattgtcggcagaaacagcccaggcgttggcagcagggttagaacagctgcctgaggctcctccctgaaggacacctgcctgagagcagagatggaggccttctgttcacggcggattctttgttttaatcttgcgatgtgctttgcttgttgctgggcggatgatgtttactaacgatgaattttacatccaaagggggataggcacttggacccccattctccaaggcccgggggggcggtttcccatgggatgtgaaaggctggccattattaagtccctgtaactcaaatgtcaaccccaccgaggcacccccccgtcccccagaatcttggctgtttacaaatcacgtgtccatcgagcacgtctgaaacccctggtagccccgacttctttttaattaaaataaggtaagcccttcaatttgtttcttcaatatttctttcatttgtagggatatttgtttttcatatcagactaataaaaagaaattagaaacc

SEQ ID NO: 16761 - DNA, 1539 bp, Homo sapiens
agatgttaagatcccctgattactttgagaaaaacaactaaaacaagaaccgtgtttatcactgttgtggagatttccttttattcttgacacaatttgatgacctaaagtgtgttttcttctgtgtaaagtacatgagctgcctcactaagcattcccaactcattgaatgtgatgtggttataaagataagttaggcagctagaccctgcgttctaaaaaaggattgcttgcaatgttggtttggctattcatttgcacaaagagactgtggctctctgttgtgagatcttcagctacctcatggtgcaataacacacacacgcttaaccatgttgatggcacaaagcggtgagcagtagggaggtagaatatcttggtggggaggggatgttatcagcttctgggagatgaagaatattgttgaggttccaaagatgctggacctgtgctaaattcttcagtgatatgaaaaaatcattgagcattcattattgcgaatgaagtggggatgcattatttctgacacccacaagcagggtttgatcatcctttcagctttgagatatctgcacataaaattattattacctgaagaaaataaggctgcattttgaaatgttaagtgcaaaatgactgatgttaaaaccatctgggggaaatcttgggatgctttttcctaggaaatcatatggttgtgatatgttttggcgcataggagacagaaatagtgattatcaggcgttgagcctttttgtagtatttttagtctttgatactctgtaagtgctagttcctaaggcaccaacattgcattccttggtttatactttttctattcatcagggtaggaagtcttaaatccttaggcatccaagaagtatactagctttttgcttctcttttagaaatacttgtggggagagaaaaaaggatggtttgggcatattggtatagtttgagtaaactaaggttaatgttcatataacatttagactttgccataaatatcagaaccaaagatcaagacattcatgtacagtctggaatgtatatatggggcccataaaaattcccagtatgcatgttttatgctcaccattatgaattggggtcttcaaagagagaaggttgaaagtggaaagcacttgaaagggctccccggtttgtaaaatatctttaatcattcacattaggtacctcggagttgcgggtctcaaatgtggattcatgcatcatttgtgcagtttgaagatagtccatatttcctatttcagtattaggtcctgcaacacttttcaattcttgtagaaggtttttttcaggagtggtgatgtctgatgctcaattactattttccctataagagtttcagcatgagcttaattaaattcttgtgaaaaaacctgtgtttttagttacacacacacacacacacacacctacttaaatggaatctaaacatttttagcctttaatccattccattttctaaaactgtcataaactatttttaatcattttaaataaatgtaaaag

SEQ ID NO: 16762 - DNA, 1607 bp, Homo sapiens
tccggcagctggtgggcgttgtgtgtagttagacaatgtcctgttgggtggtcctgttgcgtggagatctcctctggtcctttcaaagggaaacgctgttgaaccttgtgcctctatttatgcttaatccatttgagtgcctcacacaaaaaacgtagagtatagaaatccaccttaaagcccctcgccccaacttctccaccaacgccttctgggctttcttcagaggtcacttctacccttgaagctgtcggcaaaagcgagcagtaataacattctagtagactctcgatggtggtctccgctcttgcccgaaggacctctgaagtacgctggagctgtgttgtacaggtgctgtgagacctaccctattcagaattaaacctcactgcaaatttcctcccatcacgaagctaacaacactaatatacgtatttagcacctctgaggctttgccatggagacccatttctgtagggctaaggaaacatttagacgtggtgactgactttcatttggacttggcgaagtgtatctgagaaacacctcggctgtggtctctctgctttaaatcctaacaggacttcctagagcgttgacagaaattctactcgtggacgttgggaagaaagattgtaggtggcttggggaatgtgggtggcttagaggatctaaaccgattcacttcctggttgagaagcaacgagggcttgctctaaatcgtttagaggataacaggatctagagatgctctctgcttgacaacaaaagtcagggtgcagtcggtccacccttgactgctcttggcttggtctctaccctcactacctcagttctcaataacttagtgaatcactgccctcctcaaagccatttccactcagctctttccagagaattctcagttttatgagacgggaaactttatttcacgagaaagcctcattgtcagaagtatcttcattcaatgggcacaatatgctgtgtatctcaccaggtagctgtcaggggccaccgagagtgtcgttaaaaatgggcatggttgtaataaaggaggaaagtgcgacttttgaaatgtttggaaggtttatttctcatgcacattccagggaaaagcagagagtaaattagagacgggataggaaggccgtgggagaactcgatcctagcctgtgtcagctggatgtgtttacgtggagaggcgtggccactttttaggtcacctgaagcagtttagcctttggatagaggaacctgcctgaatttatggcattagtggtggcatttttttgtgtacaagatgtgggtgatggaggggctgtttctttttccgtgtgggtggttaataatcgtcagtctcggagggcgaggctcgtaggatatttcaggtgagtcagggttggatggtcatcggctttcagaaggagaccacgggaatgttcagggaaacaatgtcagcttctctgaggaccagaattcatgttcacgggcagtgatgagttggcttatggagtgagtccagtctggaattccgccgtgcattctagcctgtatcatctcatttggacaaatgctggcacgttgaaattaaaatgttaaaaaacagc

SEQ ID NO: 16763 - DNA, 150 bp, Homo sapiens
ttacaatcaggctaccagaggaagcctttggtcctaacgagaagagataattacaatcaggctaccaaaggaagcactaactttggtgctttcaagttggcaaggagtgcatttaatagtcaataaattcatctaccattccagattatt

SEQ ID NO: 16764 - DNA, 4380 bp, Homo sapiens
cagcgcctggggaccagacagacgcatgtggcaaagctcaccatcttcactacaaacacgcctgagagtggcactggggaaacataactccatctacaccttggatttggactgattctccattttatcacctgaaggcttgggccagagctcaacagctactcaactggaggggtgagggggataaggtctgtagtatacagacaggaagatggtaggtttatgccttctgtggccagagtcttggactcatggaaatagaatgaatagaggggcattcacaaggcacaccagtgcaagcagatgacaaaaaggtgcagaaggcaatcttaaaacagaaaggtgcaggaggtaccttaactcacccctcagcaaatacctatgtcaacagtataagttaccatttactctataatctgcagtgatgcaataaccagcataataaaaaggcaatcacataaaaaagagtttagtcgtctaaacataagtaactttaaggtgaatgaaagatcttctttaggaataatagatgatggtaagttccactttggttattggaaggcaagtcattattactggtattagttaaaacacatatcaaatgcttgctcttcatcatatatatagttatgcatacatacacacacacacatacagtatattctttcctcaaaagggttaagatgtctaaaatagggacctagaagcttaacactatttaagtaaatacagtagaagctcacaaatagatttctttgcacaatgattttttgcaaaattttacagtaataataatcccaaggcaaatctctcctgaactgctttccattccataatttgtagtataattcttggattccactgttttctttggggaatggaagttctgaattaaaagcccactgtggagatgctgtggttcatggaatctcttccagtgtaattcagaatcattggcctagaaagtctctgatatttggaggggaacaaaaatcactcacaagcaatccatgatctatacacataagcataatttcctttagttctagttagtcatcagagaacagtcatgtatgcaagttttgtgactgagaaatttctgtgcttccaatccacaatgagatgcatgattttgttttcatcccatttcccccaagcccctgtaaatcagggaaaatgcgcaactgatcgcctaggagagggcctcgtagtggcacagctggagatagtttcaaagtctaaaccaccagcccatcctgaggaaagcctcctatggaatgtaaagtgcaatcatttcttcagatataagactttccccaacaatgtgattggattcctttatggcaaaatcgagagaagctgccatccacctgcttatgcatttatctcttttgtggacttgtctgaccaccttctatttgcccagagtttgctcaattccaagacagtgcccatgaatgggacacctgtaatgtaacccacacagcggtttgcagagaatgttagccatgacttgggctttctgaaagttggctataatttctctatccctacccacaaccctgggaagttggagcaagaggggcatactattgggctgggaggatttgacagcatttccccagttgccctttaagttcttctatttcaaacgttaattttgcttctctttctaaaaaaaaaaaaaaaaaagaaagagaagaaagaagtgattcctaccccctacctccagagttgttgaaagctgaaaagcatacaagattcttccttttaacttggatttctcgttccagaaattgtgggataatctgtattcttgctttagaaaacattcttagagagggtactagcttactgatgatgtgttaggattgctactgatgctgtcatgtggaaactatttaaaggcactattataaatttatcctataagatgacaatgtttactcaaagtctaacatattcaatgcaagtaagactttctgaaaacacttgatgatgtggaaatgctgcaggattaaataacttgaagagcctttatagattatatgaatgcctatttgtgtctagaaccagttatttaacctgtaaaatgtcaatagcaaatgaaggatgaagtatatctctagatgcaaatacattgagtttaaaagtgcctcaaaataattgagatcacatttcaggacatttggaaatcaggtcgatttgtggtaactgtagtcatcttaaatttcaaaccatttaccatctgaaagttttgatttgaatgtaaaacaggaaattggaattcctttgtccaggagaaacctcacaaaccttctttaaggcatagttttgttgtttgtttgcttgtttgttgcaggctgtaaggcatggctgcttgtttacaaagcatctcattcatattacctgtggagttgcatatccaaaccttagtgagttttgaagctttaagcaaattcttttaaaaaattcttgtatttctagcattactagatattaaaagttaagcaaatagattaatgacgtatacataggcatcatttcacaaggtcagtaatgctgcaggaaaagcaaaattgcaatctacgtatctatggtactaaggaagtcctgtttttcaaaaatggaagcccacttctcagatttttctgaagggcatacaatgaaaagtgaaggggaaacacacacacacaaaaaaacaagtatttggcttgtcacaggaatctgattgcattaagtgaaaggattatttagaatatgttaatgcaaagctaaaataaaattttccttggcaattaaaaatgctgtgcgctaataccctgctttctatcgtgactcaattcaacaatgtggggaatgtttactacatttccaacttgatgtcaagcaatggggaatacaagttccagttctgcaaagattcgtcaactttcttagctcaagagagaggctgagaaatgcagagaagaataagacataaaatagctccgacctccatgatccgagagtgggaaaaggcccgattattacccataaggcacactctctaaggccttttaaggggcctacaaaaatgttttattttataatcagaagaaaaggaaatgaacattggggattgaaaatcatattggtatttgcaccaacatagtcataaaatagtatgttaatatgtttttactttatatatttatatattaaaatatatttaatatgttttgcctttgtggcccatgaaagtcttactgggccctggggaaggtatcctaccctggtgaagcagctgctttgctctacaaatacctggggcagaaatttgatttgaaaagtattattctctcttctctttgtttcaactggattcctttggaaaaccaaactagtatcagaacaaaccccgaaacagtaagaaattggagtgagaagggcatggtattgggactaggatcggctctcattcgatcgagctattctcttaaaatgacaaaaagtgtccataaagaggctgctggagagtgcgtggccatagggagccgacatgcccgggaggaaaggtgttgattacatggatacttctaaaagctaaagccttgttgccttctctttaatgcctagagaatgggatgtgtgatgcaaatgctcaaaacctcttaaatcatagctgtctgacctctacggacctcacatccatctgaggcttcatggacaaagattctccacttggccaaactttagccaagctcctcaaccttctcccaggcccaatctgggcacttccttgtaaaatctagttttggcaagaagtctattaggtcagtttagcaagaacacctaacccccccatatctgttcaacctcagtatctgatcaggctcctcagcctccaccatcccccaggtgatgtctggtcaactggcctgccttcagctagaatcctgttaggtcggtttagatgaatgctccctgatatttcctcttggtaatcttccatccactgcccctgaccctgttccctgtctataaatccccagttttccatggtgtattcagagctgagtccagtctctctcccctactacaagtccccattgctgtggtccccgtacctgtcatgatggtcctaaataaagtcttactgtgctttaataggtagcattgaaaaatttttttctttgacatcattcatgacaacatgaaacctattgggacagcatgactgtgcagggtctttagagctcagctttctgaggccctgagcattcttggttttccgacatcgtgaacctgttctgtgttgcaagatatcactcaagccagtgttgcttaataccatctctttgtgtaatagatctgaataaagtaattgtaatacaccaa

SEQ ID NO: 16765 - DNA, 126 bp, Homo sapiens
acggccaagtactcccctatctccgagagcagcgactaagttcaggcccagccgccagacctcagagatctcaccagcggggtgcttgccattctgaagataataaaatgaatgtgttgcaaattg

SEQ ID NO: 16766 - DNA, 127 bp, Homo sapiens
acggccaagtactcccctatctccgagagcagcgactaagttcaggcccagccgccagacctcagagatctcaccagcggggtgcttgccattctgatgataataaaatgaatgtgttgcaaattga

SEQ ID NO: 16767 - DNA, 3491 bp, Homo sapiens
ccacaaaatattatcgaaaaaagaaaagaattctaatgaccagccgtgaatgtgtagggttgcagctctattctccaaaactgtaggaacttgacttgcgttagagtgtactctgaaaccaactcgtctctggccgcaggagtctatatgttttcgtaatcttcatcaagaagtttttaaaaggcaagcaaaaacagaagcaaatcatatcaaacggggatagaatggtttccactgaggacattcagcctgggaaggaggaagtcaccagctcgaggcgtgtggattggtttccacccggaacaggctctgtgatggctgaatggaaagaaacgtaaaaagctgtgccaaaaaaaaagcaaaatgctgtgataaaccaaacagggaagggggaaaaaccctcctccttgggattttttttttttgttttccctaacaatttggacactacaattgctctcacaaaggaggttcaaagaccagtttgtaccgatgaaacgcgcaactttgtaatcccaacactttctattttctagaatcttctttgttcattgggtggtttttcagtcggctggaattctatcttctgggggccttccgtctgagatggaagctgtcttgggcttgttgtctcttccttctgttgctccctgcccctccccctgcctttccactctgtctggtgagctctgctttttcagtgcaccatcaagagatgcagccccgtggacatgaagacacaatctcccacggacagctttcccccttccgccctctcccaccctctcctccccttgcgctcgcgctcgcgctcgctttctcactggcgtgctctctttctctctctctctccctctgtacctttctcatagttgcttcagatcttaggtctcaagggcactttggcgcgtagtaagtgctttatgtaagaaggcagggcaggggggctttttacaggagaaaaaaaaatgacttataagagaaagagcctggagtatttttggaaaaaaaaataatatttttatgttaaaacaattttaaaatcttaaaatggccatcagacatagagagctttgtgtgattcatgttttaaaaagaaccgaagaagccacaggcagggcctgagggagcccctggctttcccctcagcctcaggaaaggtggtcaggaaaactctggctggacaagggtcagtcttcggggtcagcagcgagattgctctgcagccagtgagggaggtccccgccatgccggctggaagaagaacctcgcatcttttggtgtgtatgcaccttggcagccagcaggaaagcagcgaagagccgcgcgccctctggcctcaagggagcattggcagaaccataaggtactgcagaagccgtcgaaaccgactgctcggctggattaggcgtgttggctacatctttcccacaaccgtataacgaccgatggtcatttctccaagagcaggcttggcgagtccttgcagagctgacatagaggcgcccgcatgtcacttagtctaacgctgacagaaatgaatgcagaaggaagattttcagtcctgaacgtgaattatagaggtagaacgtcgctaataatttctgccatctttataatttctttgtctcacagaagactaggagaaagatcttttttaaataatctttttgctgtttttaaaaaattaaacaaggctttgtgttcctagaagagcttcatttcagtgaatctggtgacctccatctgcttgctgtcataacccgacacggacttatttttgtcattagcaagggggaaaaggccaaaggacaagggcctcttctcccattggttttcctgtgggcagaagggctgaggaagatggcccagcccgtgggggctgctgggtcaccagcagtgggtagggtgcaatctggtgtgtgttccagcagtgagacggtgttattgtgaaggtggcattcatctgcggagccaaaacccagccatcggggaagggtcagggcttctgtggaacttggaacgtgccaggaccacctgcaaaagccagggtgcgttgatcattctcagatcattgattggcctccacttgggtatgtgaattattcatgtcccagaagaccaaaaagtgctctggttctgagatgagtattttattcgtgttctgtttccgaaacacttagcaaagaaggtcacagtgatgtggagtcgccgcacccatctttgaagatagccagtgtccctggatgaggtgatgatttcccgtcccaaggactctgtgaagtttagagtacagtttgttggggtccaaaagacaccatctctaccccacccaaataaaaatgcactcatctctgtagaacatctgctgtcaaaggccagcctgtcgttagggcatggcttatgcttgacaaaccagtaacaactgtgggatggcgatggtgggatgtgtcgcaagcaattcactagacaatcttcacatgaatgtcggtagccagggtctctcccgagggatggctttagtcttgatgaatgtgaaccatgtcggaattgttaggtagaaacctgggctgggaggcctcggaccccaggctccatccctggcttccccagcctgcggccgcaagcaaaaccaagcgcgagatgcagctagcacccttcatatccatccccgttctcagcgggacaacaccatggacagccgttttcagagcctccagcatttgcacaccactactcaccctctctgctgctggcatgttggtagagtcatccctgtaatcaagaaatggcctgtggaatgttattgttcaacgttgtttacagctcttaaaacatggtgaggaatgcctaagtcttagtgaccaaacgtgaccttgaaagcagacatagcatgacagaccttcctagagtgtttggtcgggttcacagtgaccgagagtcaggtccagcacacacctgggaaagggatgctgccccaagggggaccaaaagggccggacgttacagggtgaaaccctctgacccctcgcgacaccgtaggacttgacttttgtttagtctttctaagaaatagatcatggagccaagtgaagtgcactttgtcaaatgtaagggtctgctttgttcttgttgcttttctgttttttaaccttttgttccgccatttaaaaaaagaaaaaaaaaaagcttatgtttcttgtcaaatgcagaaatgttccttccgccactcactgaagttttgcattctggcttgtgcagtttttattgtctgtgtcagacgtacagccagacatgttctctattggcatttttccgattctgttcagatgacagcgaccgccttttcattccccccgccacctgtactcaccctcacgctctttgaagaaaaaaaaaaaaatcaccttgtgtgttgtagctcatttgtttcaagagagaatcaacagatcatattcagtgtcttgaataaattgctctattttgatatt

SEQ ID NO: 16768 - DNA, 2504 bp, Homo sapiens
gagaccagtccccggtggaggaggggcacggggcctccgagctccagctccgttcccaaggatactcgtgaagaccccatctgtgttcatggcctggaaagagacttctcccatagcaaagaggctgttataaaagcaataacttttgtgtttgtgtgggatgatttatttaattttttagtttcccctttgattgctgagagccattttcctttacacataactacacctgacaccaggctctgctggatgtgagtttccactgcatgggctgtgggctgggcctgtggtgcctgccgagtggtcactgtcagtgggaaacccgttgttcctcccgtcttcagatgctgagccaactgcttggacagcagccagcgcgtcatgacgtgcatgagagggggaccctggtgctcatcttctcttgtcattcatccaggcatgggctgccaggttttgtccctgctcgttcaacagtgtgagcatttgtctctgttatctaatgatgttctctgacccagcagaaatcatcatcatgatgatgataatttattaactttttggaagggtgaatagtttcctaatggttaaaaaccaactgtgaaaggaaccacctgtgtggttgggttcactcattctcagattaaattgccacttaaagaaataacgtgcatgctttaaaaaacacagtcacgcaccaagcaggcaaatagctttagtccttctcacctcacatcacagttgttctgcaaagtaaaattttttggttaagagcgtgtccagtagtaatgtgcttgttagctgtttctcaagaccaacagaagattttttcagttactttccccccatgtattttgtatgcatatgattgtccgtgataattggctacttttccattgtttcctccttaaatcgtttagcatggcatgagggccacattccatggacgggaagaccccttcctcttcagaggtcccgtggactacacagctcctgagcttgatctttttctgccatgaagtttaaagattctatgcccatttccttgattgaaatggcaggattctaaagagagcctggtttgttaaaagaaaacactgtcatgctgtcagttcccaattgacaagtcacagactgggagaaaatatttgcaaatcgtgtatctgacaaaaggtttgtgtccaggatgtacaaagaactctcaaaccggatagtaagaaaacaaacagcccaagtgaaaagcaggcaaaagacttgaatagacacttcaccaaagagcatacacgcgtggcaaacaagcacacgaaaagacgttcagccgccgatggcttggttataatttataacttacttatttttatctaataattgtagattcagtgtatttcttcaaaaaatgtttaattaaatgcatgttaatggtgagtgaatcccttgggtgacttcgtgtttaggtcgtattagggcatttgttggatcaacggatcattttaaccctgacttccccttattcccataaaagaagttttccagtggaatggagatttcattttgtcagcagcagtgaccacagccttaccaaagcagacgcgtgcgcgtgcacagatgcacacacacagatgtcttaaaagactagaatccacacttcctgagccagaggggccgtgttgacggtaatgcattctctatagagccaagtccaaactggcaagctcaatgatgcaggcaataaaccgcctttttggcagcctaccaatgccaaaaggataaatgtctttccaaaagtgtgtattcctgttaaattaagctcttgctaacttgaaaaatccctgttctgccagcgaagcttcctcctcctctccagctggtagtcacttgcgtgaatgctggtcagtctgaaaaggtgaagctggctgtgcacttacccccatctttctccctcggggagacgacccaaggaatttcagagtattttgtttggcagagcttttacctgttattctttgccctcaaatacagtattgtggtcattttgatgatatgtgtgtaaaatgtgaataatccaattggtgtctgtactcagccttttgatgtctttttaggactttctcttctacacagcaatacgtcgtgctcgagtatccttgtagcaaagcacatagagccagctgtcctgtcagttcccctgtttgcctctgaaacgtctggttagtggggacccaaagattctagtgagtcaacatccataactctgtatctagttgtattattcatagaaaatcaatctggtgctaatggttggccctggtgttgttgggtggcagctgctccttcgccctcttgtagtgtggctgtggagggctctgcctatggggggtggcctgtggcttgtatccttcagtccaccacagcaaatgtgtgtagatttcatgctcgacacttaccactcacctatcaacagatcatcctgcttgactgtaacaaaataaatagtgtctcttcaagtg

SEQ ID NO: 16769 - DNA, 2968 bp, Homo sapiens
tggagtgcattgtgcacatgaagtatttatccacctgttttattttcatgaagttcttagactagctgaatttgtctttaaaatatttgtgcaaagctattaatatacacattttgtaaaaaaaaaaaaaaaacacgtatatctatacatatatattttataatagtgacggcaacagggcttggtttttccttgttgtgaaatcgacatctctgaagacaggttattttataaaagatcaactatcatgttaagaatgtacagtttttatgctgttttatttgacttaaaggctggaagacagaaacgaagtgagttcaggcaaattcactgtattgtaatttatttatagtacttttttttccttgaaggaaaatactgactttaagatgtattttaagactgaaattttgttctttagtacttttcatgcagtagaacggaacttggggctggtttggtttttgacacctgaaatgcgaacgctatgtgctaaatttgtcaccgtatcatatgtgcatttaccatgtatattgtacacattcactcccttgatgtcatgttaaaatgtcccctgcagtggttcaatcgtgactcggaagcatgtgtgtgttgcagaggtcagtctctggcgtgggccgcacgccaaccgctcatttctgtgttgcctttggaagcatctttctgtgctcagcgtgagtctgaagcaggcgccagggcctctggtgtacggggcttcagcctgcttgcttgtggtggctgtctgtggggcttcagcctgactgtccgtggtggctgtccatgctgcccgcctccccccaccccgccctgtccgactgtaacagaccaggagggtggcggaggaactcctgccacgccactgtgtcatgaaggaaagtgaaagggaacgaggaagtaggaatgcccacgctcgttgactccgtgggtgaatacagcagttaggacatacacaccatcacctttgaaagtgcttgtttgggggagggaaggacatacgggtaactagaactacccagcgagtcgtccagaggagaggatcaggtttgagtcaggaggctccctgtactggagtcgtcccactattcctcaagaaatcttagaaccagcttgtgaggaaaaacattttttaatgtaataaaaatatgccattattctttgaaatgccaaatgatataaatattttgcctaatacatatttattgtagatgaaatgcactcttctcgatgaggcctcgatttgaatcaatggggtgggccacaggaaatgtcagaggaaccagaactcagaactcttcctcctggacctttcttcccttcccttggaggtatccctttgaatcaggcctctctcttctcatcagtctgtagcttccccccttgtataacctgctttcctttttacatttattaaaagtggattttgtaaaagcatttcattgacacgcgacctatcacagacaatggaattcgtcagtggtggtaagactgaaatcctgatgcttttcacacttcttgtctcttgctatgtatttctgcctctagccttgccatgttttgccttttttttttctttttggccaattcctttttatatgtgcccacaacagaggtggggagacacggagcaccctgggtccttcccagcgctgctgggcaggccccgtctccaggccccagctgttgaaactttgaagggcaacaaacaaccatccacactgccggaccctaggctgttcagggaggcagctcatttccaccccggccccaggacacccagcctgtgccccacaaggatctctctaaatgggagggattgaggctacttttctgccaagccctattaagtagtaatgtggggaaacccactgtgtcagtgcaggaagccctagacaaatgttttcaaataaatttcactgcccagcctgcacagatttccatttgaagtacttcccatccaccctgacacccaaaggggtttttttgttttgttttgtttttgagacagggtcttgctttgttgcccaggctggagtgcagtgacgtggtcatagctcactgcagcctcaacctcctgggctcaagtgaccctcctgcctcagcctcccaaagttctgagatgataggcatgagccattgtgcctagcctattttgatttttttcttagagtcaaggtcttgctctgttgcccaggctgatcttggacttgcgagccaccatgcctggctgggttttttaaaaatagaatctcactgatagcctgcaagaaacagatgcagtgcctgcttccgtatcagtccaaggagccctcgtgtttgccacctttacctttgaacctccccctgcctccctgcctgtgtccgcttttgcagctcaatgcagccatgacaaggaaagaaaagacaaaggaaggccagagagccgcgcagttctctgcaggtgcagatgcaggcagtggaggtggcctgagcaggcagaaggacaccaagcgccctatgttgcttgtcattcatgacgtggtcttggagcttctgactagttcagactgccacgccaaccccagaaaataccccacatgccagaaaagtgaagtcctaggtgtttccatctatgtttcaatctgtccatctaccaggcctcgcgataaaaacaaaacaaaaaaacgctgccaggttttagaagcagttctggtctcaaaaccatcaggatcctgccaccagggttcttttgaaatagtaccacatgtaaaagggaatttggctttcacttcatctaatcactgaattgtcaggctttgattgataattgtagaaataagtagccttctgttgtgggaataagttataatcagtattcatctctttgttttttgtcactcttttctctctaattgtgtcatttgtactgtttgaaaaatatttcttctataaaattaaactaacctgcctt

SEQ ID NO: 16770 - DNA, 4075 bp, Homo sapiens
caacaaggtggcaattattttcagaaaaacactgactgtgtcatttaaaaagaaataaatgatatgttattatcccaatgaaagatcatgcattggggacagcagaaacaaaagcttttttggaaaggcggggaagaaggatgaaacctttaaaaacaaaaacaaaaacatcaatgagtaggcattttatagctttaaccccgtatgagtttcaagctgtgtttcctaatgagtttgctactgctgtgggggcatgtgggtgggtaaatgatgtaaatgatgtgatctgtacaagtatgtggagcatgaatgctgactcaagaaacttttactccttctgctcaaggctgatgtttgtaacttatgaacacacgtgaagtgttgagtccaaaagacaaaggggcatcggcatgtcagcgtccttatttattggttcttgaagttttgctgctatgttactgaatcatactaaagacatttgcgcttactttgttgaaaaagaaaaagaaattaaatttgaacacagtgaaagctgcaagtatgccagtgggtccgctcacgaccgtcctgtttcttgctcctgttctcagcctgttatctggcttatccatcagtttctgaaccaacatcaggggcacctgccatgatgagtgtgaagaaatcatttctctatgcaagactggcatcctgggactgcacgatgaactattggagcatacagtactgcggtgtgtctcctcccatacaaagggacacatccttattttgagggtatactcacccgatcattgatttgcatccccatggcatttgcttcatttatttattgcttttgcccatgcattcaatattgatcagctcagcacttccatgggccatagccggtatgcccccagcctgccataagcgtgctttcattttcaagtagcatatgcaagagtccaaacaggctacccaatgttactacttatttttcctctcaggtcttatcagatacggctgtggagaggatgaggcatatgcgttgtcagttggaatccctccaaatggattgcaagagaaatactaaattgattctaaatctgttccattatcttctctgtaggatgcaaaacatccagttgtaatgtataagcatgcacttcatactagcaatcacagcacaggaggacagcattaaattttatatagccaatttgggcactgggcatctttgtatttgaacttaacgacacatttactcttttagtcaggatttcggtcttttctgcgggaaggaattaagctatgtattaggtccaccatacgatctgtgtaagtaagattatcccacttgccctttctctttagtctttgtcccttccttttcactaagtgcccctcatccttttcaatctcattgtcactggatagtgctgtatcacttaggtgtgcattcggctgcaaataacagaaaacccagcaaacactgaagggctggataagaaccctgagagggggtactccaggactgtctccataacatcattgggatccccatcccgttgctatttctttttcaccgtttttaccttttgtcctctggcttattgcctcagagttgcaagatggttcctgaactgtcaggtatcatgtctgctttctaagtgggaagaggaagggagaggcaagcaactaggtacaatgtctatcaggaaagcaaagcttccccagagacgctcagcttgtatccattgactggaagtctgtcacgtggctccccctagccgcacactagtgtgggaaggaaaatattgagctaggcacattactctctgaacgaaattcatattatcttattaaggaagagtgttggtcttcaggaggggaagtttgctgtattggatgccatcatcgtgtccttgtcattgcccttccggttttcattcttgctaaacccctgtgaatgttcttctaaccttcctgttccccaccccttttctcagatttgacctagaattcccagcccaaatccataatttcttagctctaatacgaattttcatgttggacaaaaacctagctacaaatgggtttctatggaacttctaattaatgtgcaaaatacatattttctccaggttaagaaattttaagtcagatcatgctgacacaataagaaaatttgtttgtgtaattcattgacctcttccttccaaaataacatcaagtagccacctcagtgtgacaatatccagtcaatagtagagaatttaatccttggtcctataaaagaataaaattcattgtcgtatttatagcacgtaagccttgagtaacaggtcttaatgttagtgttggtgttgtggtttctgcggaacgtttacaagtgaagttggattctcctgggctttaaatccaaaaagtcttaatgaccgcttcatgtagttcccctcttattcccctgtggtctcctcagagccagcgtgtgctgggaaagagtattagtcatagcctggctttatagaatccaggaggtccttttagctgaaacaagtggcttcaaaagggaacatgaaacagtgaaaagatagccaaaggtcagtgaaaccacagcatttctttctaatctggctgaggccatgggggggaatgaggggaaattatgcttccgggccaaggtcaccgagggggaccttgggatttgtgtcctccccagtgcttagagtagagatacctgcaaattcatggcaaacagttggaagagttacttgactgaaacaacccaatcttactttctttcgtaagttgaacctctgatttattgtggggttcaggctctcctcaatagaaggccagagttggacaggtggactaaggtcaaggatgaggagtctgcagtggggactaccacagcaaactgccttccttccgtggagtcctaactcagccatgtggtccactcacccaggggcccgggggctcagacaaaccccatggggaacatgctgccatgctctgtctttcttgtaaacgtagttgggtagggatcccaagggtatttgctctctccaaatgcagaacttccatccactttatctggtgatctgatgaacagcatggggacgtggaggtgaaataagcatctttcagaataaggtttttttttttttcctcttccagaaccaaaggctttagacatttgtagaactttctggattccttctgaatcgggttttaacataaaaaaccatcaacacatcatgggaaaggagctctttcatgatatacatcacatgtttcttgctctcactgaggaaatgtgttgtacaaaagcaccaaataagggcaccctggaagtgacatgtgtgtttcttctaagtcgtttttagtgcatcccctgcgattgcatgatgctcatgtggcttttagggaaaggcagaatgtgctagaagtcgaagtcattcaatattcagtgcttactgttactttgaaccaggtaatctcagttctttattcagtccttcccaaagaccttacaaaggagatgtgtaaactgatagattttgagcctaataagtcacagaaatggaaaattttagagcagtttgtttcacttaggtgagaactgattactttaaattaccaacatgtgcaaattctacttagtattcattattagatgctaagctggaaaagatgagaaacccaaggagaactattgaattaccacataattgtaatattatgctttaattttgtatgggcagtgttctatcagactaagcttctagcctttgaaatgatttacatgaggagagagcctgtatatctgacttgggaaacattaagcagaccctattttcactggcgcggtaataactatttatttgctatcctagaggtgctgggaatgagcctacgtgcgactttgatgagatatattcacatttggtgttggaacgaccacatagcaacgtgttggtttttttttattgtaacactctgtgtaaacgttgacaccttattaaatattaaatgtctgaactctatttttaaaaataaaacaagcacagagtctgcaacaaacatgtaa

SEQ ID NO: 16771 - DNA, 1271 bp, Homo sapiens
agcactgtttcagatggaaaaatataaactatttttttctgagcgatacattaaactattttccccagattgaattgcactcatgatgtaatgggaacttcaagtgggtaatcacactttttccttcacttaacgaaggatactatgcactgttcacttttgacttgtgttgtaccttgcagtttatagcagatcattttgttttcttcctacttagcttaagtgggaagcagtctctcagtttttcctttacctgcagtattgtctgtatatttcatctcgaaaagcctgaacaacctctgaaaaagagcttttaaaaagtgatgaaagttgcttttttttcttactattttctcaggaatactccagagatgtaaagcctgagagtccatggtgatgctcaagagctttcatctggccaaatattttaactaaagctgttcattataaataagaggtgattataccttttttaaaaaaagttaccattatttctaaagcccctatggtatgattgtgacctttaacaaaatgcaaaggtatacactggaaaggtactcagcaaaattctctccaaattctgatttatatgaatttcttggactggatagagtactttcaactataccttcctttggaacataccttttaaaaaatgttccctttaaatcctgttattctaatatgtaactctgctcccaacaaacaggtctcctcattgtccttggcatttgacaagttatcccaacttcgaatctcatttcttcctttgctggcagcctccacccttccccacatcagtcggcctaatccaaaccttgaaagcctggcttaagtcccagtatcagtgatggtccccctctaaaacatgattttatatttggctgagtgttaaaattcacaagatgagcatttttttcccagatggagaacgcttcaactcagtctagattttttttgtttgttttaaggaagctctaagtttgccattgaaactttttgtaccagtaatccataaactggttgttctatttatagcagcatgttacaaatgactgctttttttttttaactgtctatactattaaatcctttaatttatcctgaatgctgtagtgttaaattagtggatgaaattggcagtctgtgggtgattaatttggtatggatttgtcagttttgtgtggagtttaagaaatagaacagccttaaactctacatttcaaaatacttgtatattttaaaataaagctgattagttcacaggtttt

SEQ ID NO: 16772 - DNA, 148 bp, Homo sapiens
aagatcagaagatgagaggggaatgaatacttcagatgctttcaggagtgacacaagaacacaatgatttttgcttataatcactttacttagcaaattctgtaactaaaaaagtaccattagcagacaataaaatgcattaaaaatc

SEQ ID NO: 16773 - DNA, 2168 bp, Homo sapiens
ggttacatgtgtgtgtgtacagtgcgtgtgattcccatgtccaaagtgctgtcatgctgcctgctttctggagctgtagaaagttgaaacacctggcgcagattgcagcgcagctgtgttggaggcaggactgggctgtttcctcagcctttcttttttgccatcactctaccacttgtgagcaaattgagttatcagaattctatgtattgtgtagctaggcctaatgaagcattcaaaatgagcaatgctaatgggttgtttagctttttgttttctttgtactctgtctctgtagtctctccattctaaagtttaatttggaaaggtctgtcctgaattatcaaagtaagaatactcagatttccataagctcttctcacctcctcttagcccaactcaaactccatcagatcttctcaccttgattttgagctggaatgtttcaatgagcaaaataaattagacaaaagtttactttctttttttccaaaatacacacaggttgatttgctgtaatataaaacttagaagtaaaccactgctaattaatcattttaaactttcaaaaactgctaaaacaggtgccatgaatcaggtacaattactgtagaaactaacattagctattatacactaaccaggcatttttcccaaattaattacaatctggttgtttagcctatgctaattaagccctcttagtagtagtattcactttacattgaagacctcattcacaaatacagggtgctctgtgcttatatccttccacccttgactgccaaaaatgtgtgaaatggaaagttgatggcagcagggccgacgatgtcacctggtgcctcgcgggctcagtgagttaggaagtcagcagcaggggaggcagcttgcatgcctgtcccccggcacactgtgtggaggtggaaacagagctacgccagcaggcgccaagcacccaactccagagatggaagcctggtggccttcctttcacagagctcagctgctcgcaggctgtgaaatctaagacacccctcataaatatcaaaaacacctccaaagctaacgtcagggtaaaactacttggagtcgaatccccatgccccagtaggtgtatcttgtgtatgacctgtgccctgttcttccctcagcctcgcctgctgtgctgactccttcaggggtccttctaagcatcatcctgttggaactcccaaaagtcatcccagtgccattctgtgttcaggtgcccatttccttgtgtacatcctgtccctgccacatccataagctcctgagagaaaggtctgacttgttgattgtgtcaccccatcacagctcagtgttggtggcatagttccaggtgcgtgaaagtatttgctgattctttgaagattgggaaggctcagaagggcagagttgaagaaggcatacctttaagagaagccctttgaataatcaagtgctaaaacaaaatcaggtgcttttttaaaacagcttgattgagatataatccacataccttaaaattcacacatttaaagtttttagtgtctccagacacagtggttcatgcctgtgagactggggcaggaggatcacttgaggccaggagttcaagatcagcctgggcaatatagtgaaaccccatctcttaaagaaaaagttagccaggtgtgatgatgtgcacctatagtcccagctacttgggaggctgcagctgtggctgtggctgaagctggcggatcgcttgaggcccagagtctaagactgcagtgagctctcattgggccactgcagtcgagcctgggcgacacaaagagaccaccctgtctgatagataactaacaaaatagttttagttgggcaaaattaaagagttgggcaaccatcactgaaatcagtttcagacattttcaccactccaaaaaagaaaccccacatcgactagcagttactcatttgcttctccctatgtcccctgacaaccactaatctatttgtctctatagatttgccagtttggggcatttcatataaatggaatcatctgtatgtaagtggttaataaggattggttgattgaagattgaaaagggtcagctgggaaaatttttaaaaagactgtttttaaaaaggtgctacaaaataaagtgctatctttttctgtt

SEQ ID NO: 16774 - DNA, 672 bp, Homo sapiens
aatgttgttggttctgtaagagcaactgctctgtctagtttggcgctctgggttccaggtgaataactaacaaggtggtgggtctttacccacagcgcaaacacaatgcccaccttggggctctgttgtttgagttgcccacatactgcagttattctgttaggaatgattccctgggtgcctgaaagtgctctgacacgacacttgttactttgcaggccatctgtgatggcaaggaaaaagcaactatgttcacagtgaaatattcgtggaataggttaggccatttcagtagacattgcagttagttagcaagaaccacattgtctctttatttgttagcattaaacaaatttttttttgcaaattggttttatttttttgatgaagccgagcaactctgtccaaaaaggtttagtttgtactcggaaaccacaaagtagtctcaaagtattttagagggaatcgatattgatggcaaaagaaaatttgcagctatgcatttgcttctaacggttccctctctgtgaaacattatttttggtgatctaaagaaagcattgcctttcttatttgagattttacagctatactttgttgtgtaatgttatggttccctttctgtaaaatgttatttttggtgatctaaataaagcctgtcttgtttgaaag

SEQ ID NO: 16775 - DNA, 1877 bp, Homo sapiens
ctttgacagagcctgggaaggagagacgaggaggcatgccttcagcttggtctcaacatcctgaagctgatcccatcctgctaccatcaaacattcactcggaatcaaaggtgccaattccaaatcaagaccctaatgatttctcccaagcaaatcaggcatacggagaggctgtgagctggcggccaccggatctgagaggggggagcctcaggacacctcccagccagaaggctctgagacatagcagcagtatcctctccggatctgtcgatttggagaccttccgagagagaaccaagggtgcagtcagcttaaagtgtccaggcatcacagaagcacaggaggccagttctgaaaggcgagcagaactccccctggggaggaagctcaccaaaagtttttcccaaagctcaatgcacttgagctctgaggggaggtttcacaaaaggtccccagtggctcataaagactcaaagctgtataggacattacccttgcggaagctggagggcagcaattggagatgccggggacccttcagctattgcttcctgaaccgagggcaggatgaagatggtgaggaagaagaggagaggggagaggccaccgtccaggtctcttgcctctatagaccacagatgactcaagccatgccagaaccaagcagcccatgcctggctgtggcgattcagaagcaacgaggggagctatccagagggtcagtgctgaaggtctgggcagaagacctgcgagacccagatgacttggacttcagcaacctggcttttgatgcccggattgcaagaataaatgccctaaaggagagcacatatgcaatgcctgatgggttccttgcagcccaaaatgatgccaatgagctgctctgtctcgtcagggcaaccaaggagaagagggaggagtcacgccctgaagcgtacgaccttacactttctcagtacaagcaactgttatccattgagtccagacagttgggaagtgcctgtaggaaaatggcgatggctgagaaaagcccggaggagatgctcctagctatgacttccagctttcaagtgctctgttgcctaacagaagcttgcatgcgattagttaaagtcgtgaactcagaaacacagcggcaggaaattgtagggaagatcgatgaagtggtcataaattacatttgtctactgaaagctgccgaagcagccactggaaagaaccctggggaccctaatgttggactctcggcgcgacactcaaccaccatggccgctctcgtaagcacactgacacgttctctcaagaggcttttaaacaaataaatatggaagtcacgtcataatctacctttgcaaagccatacatgaacttttatttactttgtgtgtatgatgaacagatgtctcctttcttctctctgtatattttgttattttatataaaataggagataaaagtcacattgatgaaatgttgaaatgtactaatcagatgtattctgtttatattatacatatatatacacgtaaaagaaatatccaagaaagtgatgacatttggctatttttcatatagttaaaactccaggtatatgatgtgaaattttaaattctaccatgttagagcaaaacaatgaatcctatcccctttctttccaagtagctacttggaaaccatatcattcatatttagaagtaaaacacaaaacaaaaaagagagagaaaagaaaagaaatcacaatgtatataaaacagtacttatgttttaaaattatgatttttaagcattggaaatagcaaaaagacatttaaaattcaagaagctattatgaattactagagaatatatctgtaataaattaattttttgctcat

SEQ ID NO: 16776 - DNA, 1427 bp, Homo sapiens
atccagaatgggaagtgtccagcaagcctactctgacttctgacttgtttttgttttctggatttttagctgtaggtattcagcaatgataggttaatcactggcaaaagcatcagatctttgtatatgctaagatttattgtttccccttctaaagctcaagatcatttctttccagtttttggggaaatggtggtggttatttggtctttaagtgaactgtcttaaatgagaaacgtttttgtcattttgacttttaacaggtacaggtgatctcttcctttgttctttcagtactttgaggcgacaactttcaagtatataatttcattgtggaagtcatagtttatatatttcgaggttgccaaaggtgacttcagattaaagccttctgtgtaaatatatactgataatgcctatggacatttgggtaaaaccctgtatagaattaattatccttttactttggagtgaaccttggaaaatttataattataataccatggattttgaattttccttttttttttttttttggataactcagtttcagataaaccatcttggttactgtgcttaatttggaccaaattttatttagcttaatatggacactgacacattttggggggtatacattagacatatcagagcagtgtatttctggatcattttttaaatgacctcttctaaaacataactgtcacttacctgaaatgctgcatcctaaaattccaaaattatattgagcaatcgccaaggcctaaagccaactgacttaaaggtaatcatttcagctaagattaaatttaaagcctaagaatgtatagagctagttttaaaataatgatctcagatttttaaaaaggatataggaacctgcattgtcattctctgaattaagaactgatggtttctatcattatttagccccacctttgtattttaaaatccttcagaatacatttatgaaccaatgcgactggacttagccacacacaatggaaattcagaccttgactatttggtgtttccagttcacaaaggtgatgaagactgtcttgggagcagcttaatcccaaaatttgtacatttcttgctgctcctggcgtggaaacttaagtgagaccaccaaatacattggtcctgtccaattctactgaatgggggtggacctggcatttatctggccaaaaacaggagccagagaaatatgaatataccaaagttgtttgtttagcctccaacttaaattacattagtcaacttatagatactcatatgatcacttttctttttagatactacatcaactagattcaggagtatatcatttgcagtgcttgtattggtttaaaatgtaagattttaagatcctctaacactgtactaaaacatttcaataaaatcattctgactgcgttcat

SEQ ID NO: 16777 - DNA, 1702 bp, Homo sapiens
cccttctttgcaaaacacaactgcctagtttaccaaggagaggcctggctgtttaaattgttttcatatatatcacaccaaaagcgtgttttgaaattcttcaagaaatgagattgcccatatttcaggggagccaccaacgtctgtcacaggagttggaaagatggggtttatataatgcatcaagtcttctttcttatctctctgtgtctctatttgcacttgagtctctcacctcagctcctgtaaaagagtggcaagtaaaaaacatggggctctgattctcctgtaattgtgataattaaatatacacacaatcatgacattgagaagaactgcatttctacccttaaaaagtactggtatatacagaaatagggttaaaaaaaactcaagctctctctatatgagaccaaaatgtactagagttagtttagtgaaataaaaaaccagtcagctggccgggcatggtggctcatgcttgtaatcccagcactttgggaggccgaggcaggtggatcacgaggtcaggagtttgagaccagtctggccaacatggtgaaaccccgtctgtactaaaaatacaaaaattagctgggcgtggtggtgggtgcctgtaatcccagctacttgggaggctgaggcaggagaatcgcttgaacccgggaggtggaggtggcagtgagccgagatcacgccactgcaatgcagcccgggcaacagagctagactgtctcaaaagaacaaaaaaaaaaaaacacaaaaaaactcagtcagcttcttaaccaattgcttccgtgtcatccagggccccattctgtgcagattgagtgtgggcaccacacaggtggttgctgcttcagtgcttcctgctctttttccttgggcctgcttctgggttccatagggaaacagtaagaaagaaagacacatccttaccataaatgcatatggtccacctacaaatagaaaaatatttaaatgatctgcctttatacaaagtgatattctctacctttgataatttacctgcttaaatgtttttatctgcactgcaaagtactgtatccaaagtaaaatttcctcatccaatatctttcaaactgttttgttaactaatgccatatatttgtaagtatctgcacacttgatacagcaacgttagatggttttgatggtaaaccctaaaggaggactccaagagtgtgtatttatttatagttttatcagagatgacaattatttgaatgccaattatatggattcctttcattttttgctggaggatgggagaagaaaccaaagtttatagaccttcacattgagaaagcttcagttttgaacttcagctatcagattcaaaaacaacagaaagaaccaagacattcttaagatgcctgtactttcagctgggtataaattcatgagttcaaagattgaaacctgaccaatttgctttatttcatggaagaagtgatctacaaaggtgtttgtgccatttggaaaacagcgtgcatgtgttcaagccttagattggcgatgtcgtattttcctcacgtgtggcaatgccaaaggctttactttacctgtgagtacacactatatgaattatttccaacgtacatttaatcaataagggtcacaaattcccaaatcaatctctggaataaatagagaggtaattaaattgctggagccaact

SEQ ID NO: 16778 - DNA, 1003 bp, Homo sapiens
ctgacgttaagtcatgatttcgcgccataataaagatgcaaaggaatgacatttctgtattagttatctattgctatgtaacaaattatcccaaaacttagtggtttaaaacaacacatttgctggcccacagtttttgagggtcaggagtccaggcccagcataactgggtcctctgctcagggtgtctcagaggctgcaatgtaggtgttcaccagagacataggcatcactggggtcacactcatgtggttgttttctggattcaattcctcctgggctattggccaaaggctatactcatgtaagccatgcgagcctctcccacaaggcagcttgcttcatcagagctagcaaaaaagagaggttgctagcaagatgaagtcacaatcttttgtaatcgaatcaaaaaagtgatatctcatcactttggccatattctatttgttagaagtaaaccacaggtcccaccagctccatgggagtgaccacctcagtccagggaaaacagctgaagaccaagatggtgagctctgattgcttcagttggtcatcaactattttcccttgactgctgtcctgggatggcctgctatcttgatgatagattgtgaatatcaggaggcagggatcactgtggaccatcttagcagttgacctaacacatcttcttttcaatatctaagaacttttgccactgtgactaatggtcctaatattaagctgttgtttatatttatcatatatctatggctacatggttatattatgctgtggttgcgttcggttttatttacagttgcttttacaaatatttgctgtaacatttgacttctaaggtttagatgccatttaagaactgagatggatagcttttaaagcatcttttacttcttaccattttttaaaagtatgcagctaaattcgaagcttttggtctatattgttaattgccattgctgtaaatcttaaaatgaatgaataaaaatgtttcattttacaa

SEQ ID NO: 16779 - DNA, 415 bp, Homo sapiens
tgaggcgtgcgccgccaatatgcactgtacattccacaagcattgccttcttattttacttcttttagctgtttaactttgtaagatgcaaagaggttggatcaagtttaaatgactgtgctgcccctttcacatcaaagaactactgacaacgaaggccgcgcctgcctttcccatctgtctatctatctggctggcagggaaggaaagaacttgcatgttggtgaaggaagaagtggggtggaagaagtggggtgggacgacagtgaaatctagagtaaaaccaagctggcccaaggtgtcctgcaggctgtaatgcagtttaatcagagtgccatttttttttttgttcaaatgattttaattattggaatgcacaatttttttaatatgcaaataaaaagtttaaaaactt

SEQ ID NO: 16780 - DNA, 479 bp, Homo sapiens
atgttactatctttatatttgactttgtatgtcagttccctggtttttttgatattgcatcataggacctctggcattttagaattactagctgaaaaattgtaatgtaccaacagaaatattattgtaagatgcctttcttgtataagatatgccaatatttgctttaaatatcatatcactgtatcttctcagtcatttctgaatctttccacattatattataaaatatggaaatgtcagtttatctcccctcctcagtatatctgatttgtataagtaagttgatgagcttctctctacaacatttctagaaaatagaaaaaaaagcacagagaaatgtttaactgtttgactcttatgatacttcttggaaactatgacatcaaagatagacttttgcctaagtggcttagctgggtctttcatagccaaacttgtatatttaaattctttgtaataataatatccaaatcatc

SEQ ID NO: 16781 - DNA, 291 bp, Homo sapiens
ttgttagattgttgatgcattctaaccaactcacacatatacacaaaatcaacatggggatggagaagagaattagcgtttgcagcagtgtatcatctactaataaaattaaactaatgttgctgcttcattagttggtgggagaagggacacatccactcttggaggaatatatttactcaataatggcaccttacatttataaattgtaacagttgtctaataacgtttctttaatttaaatatgtaagttgcagagctaataaatgaaatgaccaagactttaattat

SEQ ID NO: 16782 - DNA, 243 bp, Homo sapiens
ccatgtttgctgcccagcttctaacttacataccgtgagaagttacgtaacatttactcctttgtaaatgtttccctatcatcagacaaaactcaataaaaatgtgtgtaatccaatgtgggtttttttttccataattaattttgataccatagtgtgtgaaccaagaataatctagtcacgtgaaacctcttctccagtcatagtatttctcattcattataataaaagtaactggctttt

SEQ ID NO: 16783 - DNA, 1322 bp, Homo sapiens
atgtgccctacagaccctgggaccttcttgcctcagtgttgtgcttgtaaatacacagtgaaattgtctttatatcactttgacagaggagaagattgagggaggggggagggagggtcatgggggtgggtttcctggcacctacatgaaaaaaaagacaagttatatgggtgatgaagaaaactgcacaaaattaaggggttgcagaatcacgggagcataataattcccttccataatctttagcattgttctttcagtcagacatgatatgcgcaacattcagacatgatatgcgcatcattcagacatgatatgcggggtcaagttcttaagggctgtttgccttttggtccttttggtttggtttggctttgactaattctggtactgaaaagttagctatacacacacacacacacacacacacacacacacacacacacacacacacacacacacacaaacttcaaaaatgcttaaccatctgaccatagtgactagcctatagtgagtcgaggaccaaactttttcaggaaaatgctgcctcgtttttaaaacaagcctcctaagctatgttctttacaatgtctgtaattagtgtttcacttgagaaagccttttgtgggtcgtaaattatttctacttatccagtaaataacaatgacaaaataaacaccaatgacagaaaaatttctactttactgtccatataggtgtgcattttaatatttttctttccaagataaaattttgaaacttaaattgtgtattgtgtaattaatttgatagtgtaccctcttaataaatgcccactttattttatatccaagttagtgcattatatatatatttttgctttggctatatttacacgtgactttaatcgcccaactgtgactagtcattgcagctactcagctacagtatttatggagatggtgtgtcctgaacagtgtagctcaggtcagcttgaactttccatttctgctctcattgtaggtgtaactactagtcctaatgtcaactgacccatgatttctactgtcagtcaatataagtgaacattgttttaaatatccttaactaacttaaagaattttaaaattgtactgtgattttcataacccgttgcctttttggtaccagagctacgtggtttgaattctggctacatgttttaagtaagaaaaaaaaagacgtatttttgcttactcagataaaagacaacctgtaaaaatataataattaaattttacatgtgctgtacaaggggttattttaaaaagcatttgttcaatttcaataaagctaagtgtgcc

SEQ ID NO: 16784 - DNA, 1526 bp, Homo sapiens
agaagtggtgccgggtaggaaccacggttccttcgtccattagttggaaaaagtaacagacctaaaactctaccaagctactaaaaacattgcacatctgtgcttcctaaaaggaaatatgcagcacgtggaggggaacacatacatgtcttgaaaataaactgctagaataaagaaatgctggagaaattgattataagagactatagctatttagtaaagtaagtaaaggcatatccattgtgtaaattaatagtttaaatataatttattttttccttttgatctgaatacttttaaagcttaagttttatcgtgtaaatacattagctaaactgaaaagtataagtaacatgctttgttgcagccaaaaaatgtaatctgcttttttatgacagaattattatagctgagctgacttactagcttttctatactatgtatatagaagaacatgtatattgagaaagaaaacatacttatatagaggaatttatgtaaccatgactttgtaattttgagaattcctcccagtgatggtcagtattcttttggaatgtaaaccgatttaatgccaaaccaccttaacctttgtttctcagtgttccttaacagcctgccttttattaatctcaggcttttttatgaacactctcatttcagtagaatttggaaaactaagcgtggttggaatttctttgaattctgttagtaatgcccaaaagaaaagtctcaagcagtccccctatccagtcatttttatggagtttcatgttgtccactatagctggacactgaaccttttgcctaatttattataaaggcctgaccctctattgtcccatcttcacccccattccagagcagaggagtctctgtggaccatgaattgcactgtctccctcctcatttctaaatgaaaggtattagatataaatttttttgaaaggttagttgtttgagatgctaagcaggataataaatttagattttaaaatgttccctgtaaaagtcagcccatgacaaggaaatttacaaaatactagagtatctagaagggtgaaaacaaaaaaaaataaaaagaaacacagacgcccaggtgtcagctctccgtttaaagaatgaaaaatgtaactcatgatgatctgtgaaaccttcaaactaggaccaattgacttacttgatattctgcctttgatatggtagtacccacccggtattcctaaaatcctaaaaagatacaccttgcagtagcagaggcaatgacatgagtttgttttctcattaatatgaccagtttgggtctatgttggttcacatgtacatctactttatatgaaagaaaaaacagttgtctgcctgtaaaatgttgagtttcgattgagccatgtttggagattttattactattctgaagggtagtgttgttggttttcatcttcaagaagttgattccaaaactgagttatgaagaatgatataacagttccttcaaaattggcctaggaaataaaaccttaaaagga

SEQ ID NO: 16785 - DNA, 382 bp, Homo sapiens
agaagaaattaggagtgctgataagaatgaatatagatgctggccagcattttcattcattttaaggaaagtagcaaggcataatgtaatttagctagtttttaatagtgttctctgtattgtctattatttagaaatgaacaaggcaggaaacaaaagattcccttgaaatttagatcaaattagtaattttgtttatgctgctcctgatataacactttccagcctatagcagaagcacattttcagactgcaatatagagactgtgttcatgtgtaaagactgagcagaactgaaaaattacttattggatattcattcttttctttatattgtcattgtcacaacaattaaatatactaccaagtacagaaatgtgga

SEQ ID NO: 16786 - DNA, 4960 bp, Homo sapiens
aacattcatatctaggcagtattttgcttttgctttaatatatactagcttactataaattgttaactagactattctaagtgcctgcatttgataatatttacagatgtgcatttcttagcatgagagtgcttcatcagtctttgaggaaggctattcggtaccagcaagagacacaagtttctcttacagatacctgttggtaattgtaatgccttttttttttctttaagagactaggtcttgctctgctgcccaggctagagtgcagtggccaaatgatagctcactgcagccttgaactcctaggctcaagcagtcctcctgccttagcctctagagtagctggggctacaggtgctggccgcctggcccagcttgtaatatctttttatgtctgacatttttgagctatctttttatgtttatccattagtggttctatagcactatacatagggattataatcaaaatttttaacatgtggtaaggcacagacactgaccagaactcaggccttgcagaaacagcctatgggcccagactggtacttcctggctgaatattggccatggttttagatgtattttattttataacatgaatgtgtattctttcataagggcttatcagtcagtatatttgccccagtgtttagttgttacaaggacatgatatgcttacttactatcagtttatgatgtagaaaatatattttgtaattataagaaaacaagacttttcctatacccagaaatccctttgcatttccgaagatcagatattttgcttaaaggtctgatcatataggaaatatatgcagaacattttaaagaaaatgcctggctgggcacagtggctcacacctgtaatcccagcactttgggaggctgaggcgggtagctcacttgaggtcaggagtttgagaccagcctggccaacatgatgaaaccctgtcactactacaaataaaaaattagccaggcatggtggtgagcacctgtaatgccagctactcgggaagctgaggctggagaatcgcttgaacccaggaggtggtggttgtagtgaaccaagatcacaccactgcactccagcctgggcaacagagtgagactctgtgtctaataaaaaaaaaaaaagaaaagaaaagaaaaaatgcttaaagtgcctagaacttagaattctttcattgcacatttccagaaatatttttcttttcttttttttttttttttttgagatggagtctcgctctgtcccccaggctggagtgcagtggcactatcttggctcactgcaacctccacctcccgggtttaagcgattctcctgcctcagcctcctgagtaactgggactacaggcacatgccaccacgcccagctaatttttgtatttttagtagagatggggtttcactatgttggccaggctggtcttgaactcctgacctcaggtgatccacccgccttggcctcccaaagtgctgggattacaggcgtgagccaccgtgcccggccttccagaaatatttttcaaaggactagtaatctaatagcctatagtttatattattattttgtattatttgcacgctgttacatagtatataatgataatgttttctacagtgaaagagctatcccgtcttccctttacaactgtctgaactttatttactcattagtcaaggttctttgcaaggcaggtgattaacttaaatatctcagtttatacagtggtttaaaagacttttgttatggtaatagggagagaaacttgtcagataggctaaaatctagataattctacatattctgaggaattcatgctcctgtggctcttgcttataaatatcttggaatgtttctgaatgcctctaagcctatgttcagactctgttgcgtcaatgactggtagtatttctttcattaatatgtttgtcatctggtctgcaagatagggttggatgaatatacttaacactactgaactgtacacttaaagatcgttaggaaggaaacgggactacatcaaacttaaaaatgtctgtgtgtcaaaggaagcaatcaacaaagtgaaaacgcaagctctagaatgagagaaaataattgcaaatcgtctatcttataaggagcccaaatccagaatatatgaggaacttctacaactcaacaacaaaaaaccaaataactcaatttttaaaaatgggcaaaggacttgcacagacatttctccaaagaagttatacaattggccaataagaacatgaaaatatgctcaacattgccaattattagggaaatgcaaatcaaaaccacaatgagatatcgtctcacgcccatcatgatggccactatcagaagaacaaaaaaataacaagtattggggaggatgcagagaagttgaaacccttgtgcactgttggtggtaatgtaaaacggtgcagtcattacggaaaacagtacacaggtttcccaaataactgaaaacagaattaccataagaattaccaccaaagcgggatctcaaagagatatttgtacacccatgttcatagcagcattattcacaatagccaagaggttctggaagcatcccaaatgtccatcaacagatgaatagataaaggaaatgtggtatatacagtcaatggaatattattcagcctttaaaaagaaggaaatcctgtcaaatgtacaatgtggatgaaccttgaaggcattatgccaagtgaaataagccagccaacaaaagaacaaatgctatatgattcctccatgtgaagtatgcaaagtagtcaaaatcatacaatagaaagtagaaaggtggttgccaagcaacggttgggggaaggggagagggtgaatttgtatttagtgggtacagagcttgtgttgcaagaattctagagatctgttgcaaaacaagtgtgattgtacttaacactactgaactgtatacgtataagtttgagaaatatctcttttaaaaagggggaaatgtgaaggcttttgcatgtatgccctaggaaatgcatagaattcttagaaaggtaaacatggtaaaaaaagaagtctttgttaactttctgcagttcacctgtttcaaagtatagttacctttaaaagggtaaacacacaagatatgcattttccaaagcatacaggctttcctcctagctgtcttgttttttatttttttttattttttttatttttttgagacagagtcgcgctgtcacccgggctggagtgcagtggcgcgatctcggctcactgcaagctccgcctcccgggttcacgccattctcctgcctcagcctcctgagtagctgggactacaggcgcccgccaccacacccggctattttttgtattttaagtagagacagggtttcaccgtgttaaccaggatggtctcgatctgacctcgtgatccacccgtcttggcctcccaaagtgctgggattacaggtgtgagccactgtgcctggccttcctagctgtcttgtgaaacgataagtcaaaaccctactgcagtgagttttccaaactgaagggagaagcaatgtacagaatgcctgacttgcccttacatcttatacctggtgttctggcatgattattaaccacactctttttcactttgaaccatgtcctggtttgcatggccagcttccctgcagaggtgatagaaactgacttgaggcagtttctttctccatgccttagttagatgaccctcaaaggggcacagcagatttccctggctactgatacaccttaacaagaagcttgtgttttttatgccctcaaaagtgttttacttatactttcctagacataaaggtggaaaatgggcctaaggtctgtcaaaggtcttggaaaagaagattgtattaaaattgctgtccgtcttcattaaataatactagatcgatacaatgctttctttacagtattagtggttggtgaaagacttccttcctattgttacagtatatgtatatatctgtaaaattaatgagatatcctttaacttgtagattagaaagcgactaaaaactcataggggatttactaaagaagcaacaatgggaagaagcagccgatcctcctcagtgcacctttttctgttgcacagtacagtgcacagtgtgctggcatcaccatatagggcaagctgtgaccgcctttctcctttcccagggctacatggtgccaagcaggttcagtgtacactggttaccaacctgtctgattccattgtgacagaacacactcacacccaatacattacatgaagcagatttattacttacagacaggaagcaagggacaaaagaggccctggctccattgtgagccagtcccccagggctcaagaaagctgcccagggcggggctgatggagtcttgattgtacgtgccccacttgcaccacagcctgccttgggttatataccataggagccacataactcattgggcaaagctttaaagtacatcctccttccaggggaaagaggaacacaacctcgctgtctcaaacagttccctaaatcaagatgttacattccctaggagggacaacaacaaggccaacctgtttcaggcagttcctccatatcaggatattgcattcccagtgcattctacagttattcttaagaactacaagcaaggaagaagggagaactgggtcagtccaaggccacctggagaactgtcttgtacatgggttagggtaaagttggctattctaaaactaagcatccgcccaaaagaagtcttggaagatgtctttccctgttaaattcagatgatggtaattatagtttggaagtggaattggcttttagagttacttcctgtaatgaaattaacaagcaattcaggcctatttctgaaaatgaattcagtggttaattgttaaaaataaatgtctaactcct

SEQ ID NO: 16787 - DNA, 17 bp, Homo sapiens
actagttttgttcttaa

SEQ ID NO: 16788 - DNA, 872 bp, Homo sapiens
attgacccttgattttgccccctgagggacggttttgctttatggctagacaggaacccttgcatccattgttgtgtctgtgccctccaaagagccttcagaatgctcctgagtggtgtaggtgggggtggggaggcccaaatgatggatcaccattatattttgaaagaagccatcaagtcttaagtttttcatttcaacttgtgaacgtttcttctgatgtgaagcaaaccttcccttttcagaaaagggaacaagtagaaaattattttttaagcctcaagccctgttaaatggtcgtggccaattatgtcatagaaactgtatgaacaaccagatttacatagcagagaaatcatacattgaatgcttactttgtgaaagacttcaccttgtcatttctttaagcagacgctagtactttagaaatataacttgactctgttttcaggaatatctgtaatacacaaaccaaggaacaacttttatttacactcctaatatgaaaagtcaatcctgtgagagagctccatgtatgagggacactctccaagttgataacaatggaagcgagtttaatataaaacaattccctaagcatttattttttttttaaaaagatgttactgaggacctagaagaaatgctcaatacatactttgaaagcaaaaatacaatcaaacacattgacacgtatataaagatccacgcgtggctgtgcgtgatatctcacactctgaattcttacttgatggaggttttgtttgctgctacggttttaatcatccagggtgccattccaccatagaagagcaatccttttaggaaaaaaaaaatcatgctattaattaatcaaatatctataaatgcat

SEQ ID NO: 16789 - DNA, 159 bp, Homo sapiens
aggagaaaacaaaatagaaccctgagcactggaggaagagcgcctgtgctgtggtcttatcctatgtggaatcccccaaagtctctggtttaattctttgcaattataataacctggctgtgaggttcagttattattaataaagaaattattagacat

SEQ ID NO: 16790 - DNA, 851 bp, Homo sapiens
ctgttcctgaaatagaagaataatccttaacagtctgcaaactgacattaaattctagatgttgacaattactgaatcagaaggcatgaaagagtataattttatgaaattcaaaattattcttttttcaagttgaaacttgcctcttctactttaaaaaagtatatagaacagttacttctaataatcagaaagagatgttttatagaacatttctttaatataaagttagagatgtcttcataggcagtatggctatctttgccacagaaacataagtaaaattttagagttctgttttccatgaggtcaaaaatataatttattcctcagtcatggttttctaaatatctgtactccacattccattttaattgatatgagggtgttaaagtacctacttaatgggttgattactatcaaaatgaccaaattataccaaagaacttaagaggaagcactttcagaactattcacttgccaggtattttctaaaattccacctgaaagccaaaagataaaataaataagttgattttaatgatataagcatcacacaattttacattaagaaatactgtgcaggccatgcgtggtggctcaggcctgtaatcccagcactttgggaggccgaggtgggcagatcaccggaggtcaggagttcgagaccagccttgccaacatagtgaaaccctgtctctactaaaaatacaaaaattagccgggcatggtggcaggcacctgtaatcccagctactagggaggcttttgaacccaggaggcagaggttgcagcgagctgagatcgcgccactgcactccagcctgggtgatagagtgagattcagtctc

SEQ ID NO: 16791 - DNA, 407 bp, Homo sapiens
gatgaggtgtgatcactgtattgagagatatattttgtgtataactttctctgttagtagttaactattggttttgtggtgaaaattttcttactttttctaccatatctgtattttcttagaactactggacttatgtggtacaggaggctgcttagcagttttgaatagtttaatctataaattttcctcagctgtgttgcacatcagcctcgttctccctccactggaatgcatgtgttcattgccttgtcctttctctccctgctccttgcacattatcatcctaatgaaaatttcactgacagggccgaccattacaagggaactttgttctgacgatggttccttgatgtgaaaacaatattaatttaaacgtcttagcccccccccccataatattattc

SEQ ID NO: 16792 - DNA, 5799 bp, Homo sapiens
cccccccatggttcaagtgacagtgggtgaccttgtctgccaagatctttcttttgaatgttttgaacccaactacttgtcatagatgtttgactgtgtcaaaagctgtgagcagcaaaatataatccatatgaccttttctcttgcacttcacttgtatgttttactgtggtggaaaaaatacttcaactgattatcacacttgaaatgctaattatcagtggaatttgtctcctattcttaagtacttctgcaaggtattagatgctgctccttaccaaaaatcagtcttctagcaaataaaaataacttagagcattatttatttaaagaatttatgttttctataaaaccttataaccaagaaccttcaggatgcttgtaaccaagtactttcaggatgctttttgtatgtatatcacatagagtaggttggtttcctgagtaattgggattccaactagatagtcattggtgtgaccataataaaaacaaaagctaaaataaaagcatcagatttagactggcgctgtgccctctaccactatatgccaaaaattgcttctctagtgccattttgatattatatctagctataaataatacatgactatcgttttctattgaatgtcaaagacttactgggtctttacacctctgtaaagtggaggttttggcaatgagctgtttaacttggccaagctaggctgtcaacccagacaactcagtcctttcatgtaaatttttgggcaagagaagtctgctttgactgccttgcctgaccaaattaaataaatagttgccagatctctacttttatcctgcatgggataatatatctgtaaatgcatgagtttggaaaccacccatcaaatatgaaaggctgatgagactgttaggattgataaacatttgttgtttgaacccagctatccaaactggggaagaaggggaaatggttgttaccaacaatctctagtagttattttaatctttattttaacctggattgcaaatgtatggggtatgaggagataatgaaagaaaagtggtcctcatgctggatatgtgactgttttgttctctgtaaagtgtattcttgggaagtgattggtttatatcagattcagaggagcccaattaactccagtgtaggtaatgtaaaacagtaagctcaaattgcagaagccagtatcctacagaaatttaagtagctactgcttctcctgaaagcccaagttgaaaatgggaccacaggggcacagggctactgaccctcacagggcatgccagcgttaacaccactttgagagaccaatggcaagaaatgctgtctcttgtgcattttactaatttccccattcttagggtagcagggtgggggtgtatagggtctttttgaagcagttttggataggtttgcaatatgtgggattcagcctttgatttcaatagagctgagagcttttagaacaagcaggcatttatttaatgtttccttagtccattggcaagctttatcaatagcttaatggcagaggataaaggctcaaacagatgatgttttttccacagaaaaacaaattgttgaatctattccgtgcatatttaaggattttgaattgattttgaaaatcatgaaacttgaactatttttctattccctttttttcttccccatttgctgccttttttgtttttgtgggggaagggttgggagtaagtttaaactcttccgaagattatgaatgggtcagcacaaatttttaggcaactgctttttccatgttctgagatctacgggctacaacaaattttatcagcagtgttttttgtttttttgagatggagacttgctctgtcgcccaggctggagcgcagtggcgcaatctcggctcactgcaacctccacctcctgggttcaagcaattcttgtgcctcagcctcccgagtagctgggattacaggcacccaccaccacgctcagctaatttttgtatttttagtagagatgggattttgtcatgttggctaggctagtctcgaattcctgacctcaagtgatccacccgccttggcctctcgaagtgctgggattacaggcgtgagccacccgcccggctatcagcactgttctgattgcagacgtttcacagcatgtttggcttttggtaaattcaatccaggaaagactagcatgtgcactttatctcataatcttccagtacatatgctctcagttgggatagcagttcatttccattaggcagacgtataaactaaggaatgttagtctgcagtattcattttaaaaatattgacatgcttttcccctcccctccatgaagtcagtgccagagtgagccagattgggaggttggggttttgtttggttggcttggttttcattaagggaaaaaacttgcattggacaatcaaattcccctgagtttcataatctcatcaatattttaagataggcgagcacacactaataatatctatgcctaccttcttgggtggactcaactgtaaccacagtttattagttgcttagaagtggatttttaaaaaacagttaaatgtgtgtgcataacacacaagtaatgacacactactattattattacctaagtagtgctcatcctctctttctgtgttttcttaggatgtgcactttaatttaggattgtaacgcctaataatatttctgtgagcctttaatgtgatttataagatggccgaattactgaaatcaccattatacctcttccataaaacgactccaaagttagacctgcctgttggggagaattctatagacagaaggtcaatgttgtccccatccataggggttgaattaccttgctgttaagtggtcttcccccattgggatcctacagtcccacagatgaaagcacagtagtagctgacagctggcttatttggtccctcggcatctctcgtatgtggcatattgcttttgccactttcctatccagcagacatcaaagcaaaactaaaaggtagatatctggaatgaatgtatatgttgtaattgaggcagatatttgccttaattggaaggatctaactgctttacaaatattaaacaagtgcttgggcatgattgggagaggaggcagcttagctggaagctgtgcccatcttactgtcactggagaataggatgtcagagctgggcaggactggtacccatcatttgcagtttgcatgtggggaaaccaaagccctaagaaacaacagttcctggcccaaaaaatccatagaaagaggtaactagtggcagatttggggcgccaacctgattttatggattttgagttagattctctaccctctatcaatactaaaaatagattaggagggtttttttttctgtttatcatgttgaatttcattgacttaattagtctttaaatttgaaaacatgttttagggagtttagttctagaaatttctcttagattgaagtgacagaatctgaaagaaaagaatatgattgagctatttgttttcctgaacacctcaccttttatgatgcaataagttactctgagtttcttggcagagtttttgacagctgttgctttcaatggattccattcctgtattccttatgggaggttgtttttaaaatagactactgcgattgaaatgaactcaatatgtagttaagttatagttttcttcaatgtatttttagttacttgggtcacaaatgttcaatttcagcatattttagggtgagtaatcaaaaatgtgaatttgcctttgatttcctaccactgtctgagctatcataaagcattctctttagttgtgatttgattctatagtctgtttctaaatgacatttgtctgtttcttaaatgatctcacagccatggtaataatagatgtgtactcagaagatcaataaggtaatattggaattcatgtgttttttgcaattaaggcaggcatttgccaatgtcttcttttaagcagtagttggaaacatctcaattacagtgtaacaccttagagctaaaaacatttgttcaacacaaactagaatcacaccttctcactagatatcaccaagggaatgtggttttaaaaataaaaagaaaacaatataacgtatcatggcaaccagagcttcccatattattgacaagtagggatcattaggttctggtttgaacattctgaatgtgaacaaaatgaaatagtagttaagaggtgttttcccactgtgtttaaagagaacactagtaattctggtttttctttctaactgctttactgtttcaagggtattcttttaaaactctgatttcaaaggatcagttgaatttatactttagttatgggtgttttgttactttttttttttttgtatcatgactcagtatggttcaatttcctagtaagaagtggggatttgtgtttttggagtcctcagctcacatgtcttgttcctccttcagcacaagctaggggagatcctaccaacactgataggtcagtcattgatggcaatttgaatgtgggtattactctgtgagccaccctgcttcgcttgtttgtaaggagaaatgcatctggttatgtgaatttcccgagagcagcagacatggagggccagactttaaaagcaacgcaagcagattcgaagagctgttgccctcttctaaaaaaggcttttggaggctgtgttacatgcatgccctaaagcagtcagtctgttagtatgagcaagacatctgaagtacacagttgcttttaggcttgtatagttattttctacacatgccaacacacatgatgataaaggaaccttttctaggaggcattgcagggtttcaatacacaggacatgttctagttacagaagccttgctctgctgtcaacaattgggaaatgctcattttttcatgttttgtgaatactctggtcttgctgtaagctaatgtcatggctgtgggatattagagaagtgggtttatgactctgaagaccagcagacaccagactttaaaagtgcttaaattggaatttggaaactacagtaaagaaaccttcagataccagttccatcctgaagccctctgttgaacaacagggccagatcctaaagctctttcagggagctcttctctggggctggaacagttgattatgcaaccccattgtgtggagattggatcaactgagttgtgttatttttgttttaagtcaccttgtgcgagaacctcaaccgcacctatcttgggaaccgggtatacccttttctttagcactgctatcctttttgtcttcagcacaaataagatgttcaagtgagccagaagcaagaagagccattttagtcttcatagctattggctaagagagataatgagctgatggtctattttaaccttgaaagtaaaaatgtatattttttcactacaagtacattgaacagtaaaaagtgtaacagcaaagtatatatttgatgccttctgtcttttcatgataatgtgctaacaagttgtgttaatattttactcagccagagtctcattcatttgctaagcattgggaacattatgtatattgaccttaaacataggtgtcctatatttggattgtgacttgtagactcaagctaaccttactgcctctttttcacacttgttgaaaagtctgtgaagaacatagttaaagatctccaactttggaaaatatacatgatgtgaaactggggtgctatgttaaaaataaatgtatgataactaagtgtgggt

SEQ ID NO: 16793 - DNA, 3527 bp, Homo sapiens
actgcctgtaccaggctgcctggcaaaggccaaaacccttactcacatgaggatggaggaacagaacagaggacttgggaaaagtctcaacttgatggggtagcatcactgctaagcaatgaatgaatttctaaatacagtatgtgctgggtaaacagaaagtggtttagacattcttgattagtttccatattttaagtagctgcagtctttcatgtttttctttagcatagtttgatttacgcaatctccttccttgtgaaaatagaggatacaaaattgtctaattttcatgacacctagaaaacgttttcccagagctgcctattcagaaactaaagccctcactgtcattattctttaagaagatgaaattactctggatgtttggtatttttttacattaaaacaaactaaagcaaaatttagaagaaagaactacacatatgtaaataccatatttttgataaaaatgtgtaaatagatttatcaatgatgagtggacatgtggtcaattatctactgcacaccaactgtttatagaatacacaaaaataaaatgtaataactgtattctgtgaataccattttcatatcaaatgccatatttaaatgtccaccaatatgatttctgagtggtaaacctcaaatatgaattttaaactggtgaactaaaggaaatcttgaggtcatatactgaaatatgaataaattaaaataatgaattcagatctaatcatttttatgacaaattgcagcaccaaacaaactaatagcaacccatggctgtgatttgttgtgtggtaatttggacagaatgaaaagcatgcttttgattttttttttaatcagtgagagaagtcatcattctcaacacaaagccctgaacaacagcatttgacagtgtcctttagattttaattttttcaatggattgctttaaagagaatgagtagggaaaatagtagttaattttaggttatgttttatattaggctactggggacataaacggtcataactaatgactgtaatcattaaactccttaaacagtttagaaattagctccaggttcttaaactaacaaaaataaaacctaagcatgccacagagctattgattaatcagtaagtacctgtaatgagttttcagtgaagctttctctctgtgctgatgagattcatgctacctaaaaattaacagaaatgacactgtgaacaatgtagttggaaaataggtatgtgtatatgcattatttatactcattgttaaactgggaatggggaacagctctggttcacaatactacatacaactgagtttttgtctggttttactatagtgtctgcttgatggcaaaaggggagggtggagggtgggagaggaaatgtcagggcatgtgctctgataaaataaaggcagggaaacaagctgaattacttgaaattacttgaattttcttgtcttaaaactgaaaaaaaaatgtagttacacgttaaaatctgcaaatggtttttacacctctgattttaacatgaacttatactaatgtttggaatcttatgtcagaaatataagcagctatgtacttagaataggttttgaatgggagaggtagaacagagagagaattaagaagggatctgacttataaaagactagaatgtgattagagtgatagaacataccaatgttaccaagaaattgacaagctgctggctttaagcttatgcaagtggtagttgggaaagtaggaggtgtggaagagggtttgcattttggattaattcatgcaaaatgaaggaggaagcctggtctaagaagatactgtctttcaatagaaatgatttctaaactgctacagattaagaatagataatctgattgctgttgttttgtttgtttggaaagaaaaaaaatgtctggcttcttctactatttgttttcactaccaaactgtgttactaaatttcttgtcatccttgtatgtaaaatgggtgctgggggtggaggggtataagaggagggagagtcagagagagtgtgtatgggtgtgtgtgagtgtgagtgtgtgtgtacgcacacacactggggatagataagctacctggtaaagggtttgaacatttacaaaatgtcacactttttcttaaaagaaaaatattttggggtttgaataaaatggaccaccatttctcattggaacccattaattaagaaaaccagcatggtttgacaccacatgggaacatgaataaatctgtctcatgatttgaaaagtacaccttgcaaagttttaaaaataaagtttttaggcaaatgcgataagaaaccgtcatttccagtcacagtaggcgatctttcgtaatttcataaaagcagttcgtttgcagtatggcttttgtgtagttaggggttttttaagtgtgaagaaaggtatgtgggctttaaaagtgattctaaatcttgaatagaaaacacatgaattggctttaataaaaatgtcacctttttattattgacattaagtaatggtaccatatattttttaaaatacatattgacttgaattgtgaggcaataagataccttctatatgtaatgatcacagaactaacccttataatatagttttacttattttgtttactctaaaaatctatagcagagtttctctattttatatttcatagatttaaaaaacccaaataaagatggatttaaaattcactgtggaaaagagtattgagttacaaactgagaagaaaaagcaggaagttccctaataatctggaatattctacatggcttgattacatagcaaacaagaccaagatttagggctgtcttaaacatcactgccgtcttgaagcagggtacacacgttaggtattgtgaagaacatcaatccgaacttttcttctgttgtttgcactgatgcgattttttgttcttttatgtttatacaacgtatctatgttgtgtaggggaaattttttcattttttaaaaattctactttggttttgttgttgttttgatttgtttttggctaagtagaggacatggactagttgtagcaaacagaacatgctgtttgctcttgccaaaggtcagtgagtgagtgcatttgctgcagtggtggcacgtagagaactagatggtaataaagatttaaaactatgaagaaggttacagtgtaactattttggtactagaaccagttcatgctggccgaaacgacaatggtttatggacttgcatccattttgtatttttgtaatatttgtaaatatgaactttttaaattgctgcaaagatggtttcttttgtaagatgttttcaacgtttacattcaatccaagcctttgtatattttagagctgtgcaacactttaagtcttgtatttatttttagtaaaaatggtgacagtttcattgtgaacccctctcaaaaaaaatgtatcagaaaagtttgattacctagaaagtgtgtatagaaactgcaaataaacgtgactgcaatt

SEQ ID NO: 16794 - DNA, 1592 bp, Homo sapiens
aaaaatccttgtgcaaatttagattgggccaacttctagaggcaccaatgccttcttagtgtggaatcatttttctgccctttagtcgtttttgttttgtagaaagtatctctcaaaatatattatagctagaattgtagaactatgttatagtccagtctacttctttaaaaaccatttaaactgctagatagtattagaatagtccaatagaaaattcattctttataggtctttaaaaattacttttattatattgtttacaaatatatttcatgcaagaaacagaaaaaaaaaaaaaccctttgattctggttcatctcgatacagagaaccaaaacagctaagagaggtattatcagggttgacaactcctatgattgaatctatgggaattattcctcagaagagaatttaaaggtgtacccatatatatctctttctggagtattttatctgtctgatgttgcagtattctacaagtttccagaaagagaatagccatataaattattttcctttctgctattatttctctatatgttttatttattcagatttagagtaaaaaataagcatataaacttttattatgtgctcttaacagttttaagataaactataggatagatagaatggttattttatgcaagaaatattgtaccgcaagggtggtttggatgaagtctgactactttttttcaaacaaactattatattaaaactgtcatattttggctaagtttggacctataactacactttcattgtttgcatctctctatgaagatacgtctgtccaaacttttaaaaggcataactgtattttatgtgtttattctttatatagatagtattttatattttattctcacccgaagtattcacacaatctttttaaaaaaaatttgaaatggcattttgtattgccacagaggtaggatgagccatatattagtgaaatgttttattttgtaaaatataaatggattatttgccatcattagtacctctcaacttactttttagaggacaagaaacaatctgtagattggtttccatacagggaagttctccgtcctatgcaatgtttctaattaatttgcttaattctgagccattaatcctgctacactttgaatgatacattaattcagactaatctttgggggctttattttgtaagttagaactttcaagggaaacatgttcaacactattattttgttataaatttataactttgttattacattgtgtaacaaatataaggtttacgagctatgagaattggtgctatcaccattagctatttgctgtaatgtcaagaaaatgttcaccagatgcaagaatgtaccttttctttttagaaagccaaatgtactttagacatgaatgcaactatttaaagaatagcttcatcaatgttattccttacatgtcataagattcttacttaaacttggtcttctttcaaattgtttgtatgaagatgctgtacccacttgaacagtcctcaggtgtttacataaatactatgttttacagttttcatattttaaaatattaataaagttaaatcacaatagttc

SEQ ID NO: 16795 - DNA, 83 bp, Homo sapiens
cttctgcaagcctgcggctggtcccaatgccctgaatcacctctctcatggaagaaccaattaacaccaatgaatcaaccatt

SEQ ID NO: 16796 - DNA, 427 bp, Homo sapiens
acacaaatgagagcttccctcaggctccctgaaacagctaggcccaaatcacaagtacagtcctttccaacacccctgaaattcatagtcagtagcagagaaaagcagatcccaattcatcccacaaacagatgcatagtatgggttttggaagtccctagcaagctgttattggtaagattaggttaaatgtcagtaataggatttggtttcagcattagtacctacatattgccagtgagaaactgggttggacctagtggtgttgtcgtgagtgccacctaaccaggaggccagagcggtttgaaaacatcctgaaaggaactcatacagcacaagagaaaactactaagcttgacatctgtgagtgactgagggagacaggaggaataccaggttattcatggaataaagtctttccatcttt

SEQ ID NO: 16797 - DNA, 194 bp, Homo sapiens
ggggaggagaaggagaggttataccttcagggggctaccagacagtgttctcaacttggttaaggaggaagaaaacccagtcaatgaaattcaatgaaattcttggaaacttccattaagtgtgtagattgagcaggtagtaattgcatgcagtttgtacattagtgcattaaaagatgaattattgagtgctt

SEQ ID NO: 16798 - DNA, 140 bp, Homo sapiens
atgtattctgccttcagaccatctagtacctgctggtactctgaacaagtatataaggtagtttttatatcaatgtgtggaacacttgacaagctatactttaatgttaccaaactatatgaaacaaaccatatatggtc

SEQ ID NO: 16799 - DNA, 100 bp, Homo sapiens
tgtttgcactcatctgacagaatccctgagttacagtatacagctatgtggtaatattcattgccattgaaattcttacttggtatgaaatataaagtgt

SEQ ID NO: 16800 - DNA, 485 bp, Homo sapiens
agatcagtagcccctaatcacatgtgctgcaaatagccttcctgacctccatatgctgtacatgacatcaaaatgagtcaggcaattgattgtgaattccttaaagttttcctttttttaataattatttttaatttaaaaaagcaaatggaaaatgtatattttgatgagcttagggtgttttttttttgaaagtcagctgaaggatggttagacagcacagcgaagactgctaaatgcactgaccccccccattagaatgtgatttttgttcctttttatttctctgtgggcttttgtttttgtttttgttttggtagatcttcaatttggatatttggaggagtgaacatcgttgttttgctggagggaagatcttgatggtgtttctttccccaaaaattgacttagatattaaaatttggtgcttataagagagagttaaaaaaaaataggattgcttcaattaaaattacaaaagagac

SEQ ID NO: 16801 - DNA, 406 bp, Homo sapiens
ctgggacgctggtttatggcatcctgagacagttgcacagtgccagcggaggctgcactgagccttcatcgcccattgctttaggcctggagactttcatttttagtgcattttcattatttgggtaggtgacctgcttggatctagacagcatctgttcaaagttgtagggcttataaagtggaatataagaatgaactaagtatgtttctttagaaaatcaaaccaacaaaaataaatccctaggctacttttgttaaaatgctatctgctaaattgttgctattgtccattttagggtgttggccacagttatgtggtacatagcatttcaatctatagctttgtgggaagcctaaattgatgtatcctttaaaagttcaatctattaaacttgtagcctctc

SEQ ID NO: 16802 - DNA, 188 bp, Homo sapiens
ggatgataacagtatttggaactgaagacctgatgggaaaaaaaccttcaagttctatactgtactgtggataagcggctcagttcagcagagctggagttgaacaactttgttcctctggtgtggtaaattgacctaaaggtgacctctgacgatttcctgaaataaatatgcaatgttacattttc

SEQ ID NO: 16803 - DNA, 134 bp, Homo sapiens
aaagttgtaccaggctactggaagattccaggcatgttaaagatatgcagtattgaatatatgtaaggaagtattggaaacatactagccatttgaagacataactaattcttaaataatactgctaaactttc

SEQ ID NO: 16804 - DNA, 2616 bp, Homo sapiens
taatgtctgcttggcatattttcaccttaggtcttatcaagaccaaagagattatgttaatgaaacaattaaattcaaagttcttcccttttttaaagataggaaacaggcattgccaaaaaaaaaaaaaaaaaaaaaaggaaaggacagtggggagaaatgggcctggcatattttcagtctttaaaacaaaggagttgttatgagaattcacacacacatagacacacacacacacacacacacacacacacacacacacacaccctgggagacctatagtctcttaaactaagatcaagtagaagaaagcttattaacaagcaggatcctgccttatccaaactgcagatgttgctggcattgtgacaaaacccactgattgaaaggtcaactgccaaggcagaaacacctttaagcattgttcaaacaataaggcttccagaacttctgtagagcagtagctccagtcatggtctgtggtttgaggttttagctgtctcacctagctccctaacactgaaggagatacttgtgaaagttctgaccagcaaaagcaagccagagccttggaaactgatatgtggtagagtggccatcactcatggactaaaattgattcaccgctaaatttacccaggtgaagcagtttcgttgtctagaatgaaattatcatattccgccattggtatgcctttaacatttgtatagtttggtttgcttaaaacaccttaaaaccaatgacagctccagcactgcagaattggtgtgattctactttggaatagcttgtcacttgtcaccaaatgggtctgctttattagttacagctcttggcaggaggatccagggacccaaaaccacagggccaaacccaaatacctggcatgatggagcaaaagcaggtgtctacttggacccagatatagtgtctccattttaacaacaacaacaaaatagccagctggtacagctgtttgcattggccctacatgcattttttgcatggatatccagaaacatctgcccacacaaaactgcggggaaaaaaaatgaacactgaaatagttatttgctgttgcttccaacttgtagtgccagtctgcctttgctgtgaaacacacctgctcagagacagagaggggaagaagatctttggtaagtctaagtcctgacgctgagaagctttgtaaaagtgcagggagataaagggccaaaagggagatagatggaaaacactggaaaaagtattcactgatacaaatctatcaatgatggcagtccaattctcttgctaaagtggctgcacctcaccttgctggtcccccccacaccttttttgatgtccttctgcgtcatcatagcaaggcccttctgtaaattaacaagcctagatatttatactcttgacttccagtatctacagaagaatggttcatagatctaaacagaaatggtttagatctaaaaaggctgtatacgttgcccaggcccctgcatttctttaaatttataaaaatgaagctaaaacctggttacatttgaagcaaatatctacagtatttttcccttttagagatgtagcttccttagacatctgtagtggtaagcatttcccaaaagcatcttacctttctgaaccttagcagacatactgtgcagcttacctatcttctgcagaggaggaaactgagacctaggagaataaagtgactcactcaggtcacaccactaaagggttttcatcatttcagcatacctaagacagggcagtccaattttcagtattctcataagatggctattactcctctcaaaatgcatttccaaagtaggaacataggacttcgttggccacagggcagacatttttttagtgtctggaattaaaatgtttgaggtttaggtttgccattgtctttccaaaaggccaaataattcagatgtaaccacaccaagtgcaaacctgtgctttctatttcacgtactgttgtccatacagttctaaatacatgtgcaggggattgtagctaatgcattacacagtcgttcagtcttctctgcagacacactaagtgatcataccaacgtgttatacactcaactagaagataataagctttaatctgagggcaagtacagtcctgacaaaagggcaagtttgcataatagatcttcgatcaattctctctccaaggggcccgcaactaggctattattcataaaacacaactgaagaggggattggttttactgttaaatcatgtgttgctaaatcattttctgaacagtgtgttctaaatcagtcattgatttagtgtcagccacgtggagcacctcggcttaaagcagctccacaaaacctgacacaacacacacaccaattaaatggattttgttgagaatttaatcattcaatttggtcaaccagaatgacttcctgtggaactctgttttatgacagataatagttttccaacttgattgagtctctgtataccctgggatattgtattttttaatgaagggcattttcaaacttgtcaacttctcttttcagcacttgaaatgaaggcttatggaattctgactgtgaaatgaatttttctattggga

SEQ ID NO: 16805 - DNA, 61 bp, Homo sapiens
gaaatacttcttcaagttatgatgcttgaaagttctcaataaagttcacggtttcattacc

SEQ ID NO: 16806 - DNA, 352 bp, Homo sapiens
ggagtgctgctgtagatgacaacctccattctattttagaataaattcccaacttctcttgctttctatgctgtttgtagtgaaataatagaatgagcacccattccaaagctttattaccagtggcgttgttgcatgtttgaaatgaggtctgtttaaagtggcaatctcagatgcagtttggagagtcagatctttctccttgaatatctttcgataaacaacaaggtggtgtgatcttaatatatttgaaaaaaacttcattctcgtgagtcatttaaatgtgtacaatgtacacactggtacttagagtttctgtttgattcttttttaataaactactctttgattt

SEQ ID NO: 16807 - DNA, 204 bp, Homo sapiens
cattgtgaaaactaaggaatctatgtcagagtgtcagctggaaaaagaaaaaaggactcattttcctggtatcaaaacttggcagctggtgattctccatcatgataatgaacagttaattgacagaaaaccaaagttgtttaacaatctgcttgtctgtctataaataatgagtatgtgtaataaaggaaaataacatagaat

SEQ ID NO: 16808 - DNA, 2023 bp, Homo sapiens
agaataccagttaaataatacattcggatggatttggaagttggaattcctcttaacaaccaaggggtttattttcaaagcaatattggggaattgatttcacagttcgttaccttagtaggtaacggtaaggttattctctttttttttttttttttttttggttatgaaaacttagggactaaaattaatataaaaattggcataatgttggattgaatctacattttggcagaagttaaacattcccacataatgtcaaaattatacatcatgcagttctgtttttttgtttgttttattttgttttgtttttgagtctggctctgtcacccaggctggagtgcagtggcgtgatctgcaacctctgccccccgggttcaagcgattctcctgcctcagcctcccgagtagctgagattacaggtgcgcgccaccacacttggctaatttttgtattattagtagagacggggtttcagcatgttggctaggccggtctctcctgacctcagggtgatcagcccacctcggcctcacaaagtgctgggattacaggcgtgagccaccttgcccagcccacatcatacagtttgaaatgaaactttgccacaaccagcctttgctgtagcacacacatatatcactgaacctgtttgaaataaagttttttttctttttcatgattcgtctttgagtacctccaggctgaaagactgttgtaccagtaaaaacttaaaggcacaaattctccttgaagaccttctcccttttatgtggccccatattttatgttgctttatctttgaaattttgcatgaaaaggaaatgaatggattcgaatgaaattgtcctttagagcatgattacttgttcccatggacaaatatttttctccccttgctcttcctggcctgaaacacgggaaaccagagtcaaaagttatctccctctccctgtgatgccttgagatttttttctgcgttgtttaatgcctgaaatccaagtcttcctccatgggaaaatactgttataccaaataattctagatgagtaacaaagatctttttaggccttcattttatgttttttcttaactgttatattatgattgtgacatagattatactactactaatttttggatgtttcaaaaggtcaagaagtaaaagatgttagaaagcaatgagtgagtccttttgatttttaacttattccccatgtccctatacttcgtgtgcttttcctttttttttttgagacggaggctcactccgtcacctaggctagagtacagtggcacgatcttggctcgctgcaacctctgcctccctgattcaagtgattctcgtgcttcagcctcccatgtagctgatattacaggcacttgccaccatacccggctaatttttgtatttttagtagagatggggtttcaccatgttgcccaggctggtcttgaactcctaacctcaggtgatccgcccgcctctgccttccaaagtgctgggattacaggcgtgagccactctgcccggcttatttttctttatgtttttgcttcgtaagaggttctgttgagcagtgatttgcaactcttgctgacgttgctggggaagctttaaaaaaaaaaaagatgccccacagagattctgattttaattgttctgatttaattggcttggagtagaattcaggcattgatatctttaaaaactccccagtgttgagaaacaaatttagagagttgagaagtaggtatattaaattacagaatcttactgagttttggtagactgataatacaatttgctttgcttttcttaaatttgcattgagatgggatttgaagcatattgtgctcttgtgaatgttgaagttgcattgtagaagtttagaagctctggctatgggttgcctaaattgatgttttgaggaagcatattaatgttataaacttcgctgactttgaaggttgtgttgtagcatgaggaacacaaataaaacaattctaaatcaaact

SEQ ID NO: 16809 - DNA, 3134 bp, Homo sapiens
caatacttctacagaacgtttgtagagatattggccttgaagcagaaaattcattttaaagccaatcagtctcattcacatacaatactgtatattgatttatgctgtgtacaaatagaattattacttctagttgacttttttttaaatatacattttgctcagtagtgtgttctgaattctattcagtttgtttaataaatagggaaaactggcaacatgctagttacttttaataaagtaatccctgattctataccgaagttttatatcttagaattttatatttatttaaatatttaccttgcttaccttgatggtactcttctaagaccattaacttaaggtaactttatattggtaactctgaaagtattcatgttgactcatttttttccccatacatttctcacaataaaattgtcagagacatctactaatataaatgggagattttacagtcaggtctaattatcataacatggaagtcatttacttgtcttgcttaatattttcagaccacttgacagtgaaagtttccatttgagctgttgcgtccctggctttgctgagtaaagagcagtggctgggttcgtgtttacttttcaaatatacttcttttggctttctttggattatttacatcttttgtcagcgtagcaaacttttagaaaaccttattgaaaaactgtgcttgctcatgttgtattttgattattctgtctgtgcggcttcatcttggaatggttgtgtgctacaaatgacacttactgaggactgcattttggaatctcctagaggtaactcatggcttataggatcttttgcaactttatgtatgtaaatgtaccctgaattatatatatacacatatatatcatgtacctgtgtgtattgcttattttacatatttatacacacaaccccaagtagtagttgtttaaaatctataatgaaaagtattaaatttacaataacatgaaagatccagggatgcatgagagagcattttgtaagtcatgctcttcagagagactactcaggtgaagaattagaaggaaaataaggacactagtatttttaaagagtaaagatattttcttttaaatatctttggtaattgaaacatagaggttaagatgtttctaggtagaatgttttcatacaatttcacctccatgtctttatgtttttctgaaaagcaaatgagtatccagacatgactcccacagttctctttgagaagcctgagagggaactctgtcttacctagtgagggggatggaaaagaagtgatggctctgtggaccagagaacgggtgctaattatgacttcacactcggcaagttcaggctgatctgttatttctcagttacagttagcaaactttaaaaacttaacactcaagttggctttgattaaaaggtaaagatgtgttttaagtggataaggaaagtctgaggccttatttggaacatcactaagtcttccacaggttttttgtttgtttgtttttttttgttgtttttttttcttaagacggagtcttgctctgttgcccaggctggactgcagtggtgtgatcactgcaacctctgcagctcactgcaacctctgcttcctgggttcaagcaattatctgcctcagcctctcgagtagctgggattacaggcgcccaccaccacgcccggctaattttttgtatttttaatagagatggggtttcaccatcttggccaggctggtcttgaaccctgacctcgtgatccacctgcctcggccttccatagtgctgggtttacaggcgtgagccaccgtgcccagacaccacataggtctgaatcagtgtcatacattcataaaacaaactcggttaattagaacttggttatgttaagacgaatctgggagaacagaaaacagtttttggggtcccttcagttggctattggtccgtatgcatctagcacattgtaggagatttagaaattgtcttcccacccgatagctgccttgtcacctcattatggtgctccatcccctgtgtgcttaggtttttacctttcatctttctctttgccattgatgtttgtattcaagagttatatttttagggttagaaatcaaaatatttggtgtttggcaaacctctgaagtgctagactgatttagtctagttttaaaccaagtgctttaggcaggtgtgaactccagcccaaatgccagtcaaagtcaaggcatgggttttcctagcctatcttataggaaattcctgtaccttcttggcccccataatgtgttttttttttttttttttttttaaactaacttacaattttgtgatccgtgattcattgccctgcgattcttgaaagctctgtctgtttttttgtgagaacctttaaaatctcccttaatttttattttcccagaaataatgtaaaaacacttaaatgaaagtggaaatgtattaattttaaatcctataaaattaatacagaaaatataaatgattgggtcatttaactatatttttttaaataaactgaaagataaagaacacaacacttcacacattttatatttctcttacatactccggaatcatacacagttctttttaaagcacaacattaaaacctttaaaaggtatttaagggtttggtcaagtgaatatgataaaacatacttgtctgtataaagagaaaatgaaattgtagtcactgttatgtactgacattagttacaacctagttttaattcttaaaacaattttgattagcaaagctaaaaaaaaatggatgtttcagttaaatgttttaaagaggtacagatttttacaaggacataatataagttattgttctgtagaaatatcctattaaatattgtatgtccctccctctgtacactttgtaaagaaagtaaaatacataaaaagaaaatcatatagggatgtgtgacattattgtaattgtgtacttgagaataacgtgcaaaaataaaaatcagaatattttcctgttattgaatgtttagtctatttgataccagtactaagttaatgctttttctcaaggaaaaaaaatgtacagtttttgtaaacctaataaacatcaaaagcagtggatt

SEQ ID NO: 16810 - DNA, 353 bp, Homo sapiens
tataccaccttgatttccattacaaagtatctgatttgtctgaataaaggtgtcccactcactgttccaggaattcttgcagtgtagaggtattcacaacagcaagcagggatttggcctgccatcaattttatttaaaaagcaattaagtttgcagtttgtcctcataaacgttgtaggttgaaactgaaaaataagttaaaatgatcaatcaagataaaaggtgatctatccatccaatggaatattatttggccttaaaaaggaaggacattctgatatgtgctgcaacatgggtgaatcttgaagtcattatgctaagtgaaataaaccagacataaaaggacaaatac

SEQ ID NO: 16811 - DNA, 1033 bp, Homo sapiens
gggaatcccaggagtaaccaaggagggggtagttgaaaaatcccagcttcctctgtgcctccactctggccctaaatgctcctccagcatctgtttctcccttgggactgtgtctcatgtttgtgtgaatgtagaccaggaaagggggctgcaaaaatgttgagtctaatgttcgtaagcatcatagaaattcctgtcttcatattaagatgtactgctttaaaacacaactccagagcccctccccaagctcccctccccaagctcctgaagacccggtttctgagggagggaaattgctacttggattgagagtagctggaatgtaagtgaccccaggctttgcctcagggcctttagcctatgtcccccccacataaagagagcttctcagagcctgactgaagagctgacgttttgctttttcatatgccaattaaacccggtctaaatccaaatgcttctccagccatccaggagtggctgtccttttcagtcttgtcttttatataggtagctgagggggaagatttagaagccttgcactcactaaatagattaaacagagcaggcttgtttgttgaattgctccaaagtccaacagacacacactgagcaggtgttttacactcacattccctttttgccccttaaatagaaagtgcaggtaaaggtttatacaacaagaaagcacattgaaaataatttgatactctaacaatccattaacatgtgtaggggttacggtgaggatcactgtgttgtattcagaaaaacggggagagggatgcttaattggccctggcgcttgctatttttttctcatttcttcacaataggaccgtctttggcagcagcaaaatgtatttcagtatggcagtctttcctctcttacattattggtaagattatactaacaaaatgtttccccttgtacaattatgctgtgtttttaaaaaacattgacctgtgtgtttttataaaagaaaaagtatgttgtgccttcttcttaagaataaagttttctaaaggg

SEQ ID NO: 16812 - DNA, 556 bp, Homo sapiens
gttacatttcaaatgttcaagtctgaagattgttttctttgtggaagagaagagcagtcaacattctaagtagtgaatggccagagtgcgtctggagggaacacagcatatatcattttgtgttaatagtctatagtaactcggagttgtatctttttctttcttttttttttggtgttatatttcaaatgttgttgcttataatagaagttttagataacttcagaatctatatttattaatgactttggttacacacgtattgctatttaagagtaggagttttattgttctgtaaaacaaattgggaaaccttctttcatatttaatgagccagaacaaggaaacacagtattggaataggtatttccttaaaaaatgtgagatgatttagcagtaaaattttggagatcaaaacataggtgagaaaaagtaaacttttcagttcttggttttctttttccattttagtctgttatataaaaataaaagtcatacctggattggcttagcttactgaagaaggtaggaagaaataaaatgtttatgaaccagc

SEQ ID NO: 16813 - DNA, 575 bp, Homo sapiens
ggcagggctggcactatttccttggccagggtaccttatggggccatatcctacagatcctcccatttctagggaggtctgaagtagaattttcactttatgttagaagagagtagtgagctttctaagtagtgcagtatagtagaggctggagggaacaagatatgtatctttcttttgttacacatgagtaacttgcagatttatgttttatctctgtcagttatcaacattgttcctgttaagtgaaggtttattttgcttcagattatacaattatcaataacatagctctcacattcatggctgtttaaccaatctgaaagttacggtttgggaattaataaaacaaagtcatacaacacattttctttgtaattgagaactagataacatggtaacagagaattgattttcatatgaatcttaactccacagtaaaatagttgacatcataatatgaagagaaagaaaaggaaaaacagaaatgtaaaagttgtttaattcttggtttgcctaattcgttttcctatttcttttcatacaaataaaggatacctggatttatttaggtt

SEQ ID NO: 16814 - DNA, 295 bp, Homo sapiens
agtctgagggagattcttcatttgtgtttgaaaagaaatgcacattctgagctgtgggaggtcagggtgggactggagacaacacagtgaataatatgtttgtgttaatgttctatgtgatggcttggaatttttgaagatgttgttcctttaatagatggttaaagtagcttcactatctaagtttatgaatgacattgctcaaatttttctgtatgtgagattaagagtaagcgatttattgctttataagtctaattgggaaactctccatttatttagtgatcgaaacacg

SEQ ID NO: 16815 - DNA, 891 bp, Homo sapiens
cagaaaagcaagggacatcccgtccctgggaggttgagtggaatctgcagtccagtgcctggaactaaatcctcgactgctgctgttaaaaaacatgcattagaatctctagaacacgaggaaaaacagggtcttgtacatatgttttttggaatttctttgtagcatcagtgtcctcctgttttaccatgtcttttaccattacattttttgactttgttttatatgtcgttggaatttgtaaatttacattttttttaaagaagagactgatgtgtagatagaaaaccctttttttgcttcattagtttagttttagaatgggtttttattttatttccttttttaaaattttactttgcttttaacatttccttggggtgcttggacaaatctatccgatgggacaaggagcaccggattctttctcgggttctgcctagcatcaactgggccacgtcggccttcagagaacagtgcaacaaatgccagcattgccattcgggggaaaaaaaaaaaaaaaaaaaaaagatgagaagaacacttgttcataggagggccccaccagtcagagccctgaatctcttccttgtcccacctcattccccacctctacctttctaatggcggcatgatgtgtaaactctgtgcaggggtgggggcgggtctaactgtcttaacattcaagtcactgctcttcagaatacactctagacccaaaggtgtgctaatcacttcacagtgaccactacagagtactaagaagagaagatcaagggcatgaaattggggaagagtgttatttccgttttttaaatgagttgatgtacccttatatatatatacatatatatataaatataaatatatataaaaacaacaaaacaaaac

SEQ ID NO: 16816 - DNA, 547 bp, Homo sapiens
gccagagttgtagccaggccttgcactactgccatagccaatcaatctcccaaagccaagtttacctgctgttctcacccccaatgaggtcttaggcagattctttactttgtaattcaaaaggcctgttaacctttgttcttgttatgcatgaataacttgttgactttttttttttctctttttcaactagtgtttcaacaggtttatttagattcagaatgtaaatttacaaatgatatagatcaccctgttattgctgtttttcagggacagtagaaagtgttttgttttttgagtgaaacaacttattaataaaaatccttaaatcacttttgtaatccaggacaagaaaatgtggcattagagtagaaatatctttggaaatgtgaaagaccccatagtgaaatatttgggatcagaagccagaggtgtaaaagtggtcaattcttggtttacttcatttaatctttcttttcataaagatacatacctggatttgtttatgttattcaagaatgtgtgagaaattaaaccatagttagtt

SEQ ID NO: 16817 - DNA, 525 bp, Homo sapiens
tgaagttgaagcaaattttgcattttgtggttaaagagggcagtcactgttccaaggagtgaaggactgggtgttactggagggaacacactgtataataccttttgtttctgttctaaatggataatttgaagttttatctgtattttggggcatatttttcaaatgttccttttatttaacattgtaatctaagtttaggattgatactggtcacatttgttgtttaagagtaaaaattttgctgttttgtaaaacagattgagaaaaattcgatcttatttagtgatctgttgcaagataacttggaattagaataagcatttccttgaaaatgtttaaaaaaaaaaagtcagcagtaaaatgtatggcattaagaaatagagaaagagtgtaagatggtcaatatttggtttcctaaatgcttttactctgtgctttaagaaaatgaaagataaataaccatatatgtctggcttacttaagaatgtagaattaaatcataataaattagacctcatgctg

SEQ ID NO: 16818 - DNA, 1013 bp, Homo sapiens
gatctaaggcaaattgttcactttgtggttgaaagacctgctgctttctctgttcctgtgatgcatgaataactcattgatttatctctttgttgtattttccatgatgtttcttaaaatagaaagtttatttagattcagaatataaatttagaaatggcatgcatcacacatttattgctgtttatcaggttggtttagtgataataattttgtttttgaaatacaaatagaaaatcctgaaataatttttgtgatacagagcaaaataacacggcatgggagtaaggttatccttagaaatttaaaataactccacagtaaaataggtagaatctgaagatagaaagggaagaaaagtaaaagttgctttattcgtggtttgtcttactcagttcagtctttttttgctcataaatttaaaagttacatacctggtttgcttagattattcaagaatgtggaggcctgggccaaggtcaatgacagtgtctccattgtcttccctccattaagagaagactttaagagatgagggagagagagccagagacagtgttgcaactgggcctggcatgtttcagtgtggtgtccagcagtgtctcccactccttgtgaagtctgaggtatattctttacttttgattaagaaaacacttaaccttctaattaatggagagccaaaggggagttggtgggaacaccatgtataacatatttgtatgtaaaatgatttatcttttctttttcctgtttttcagtgttctttttttaaattgtagatttatttagtttcagaatctaagtttatgaatggcatgaatcactcatttattaaaatatatcaggttggagagtgagaatttttgcattatgtaaaacaatttaaaaatcttttaagtctttttctgtgatctagaacaagataatatggcattggaatatggaatttgtgaaaaggaaattaccttgcaataaagttggtgggaccaggaagtagagaaaaaaaaagt

SEQ ID NO: 16819 - DNA, 500 bp, Homo sapiens
gaactcaggcagattgttcactttgtttttgtggcaagatgccaaccttttgaagtagtgagcagccaagatatggctagagagatcatcatatatatctcctttgtgttcctgttaaacattagtatctttcaagtgtttttcttttaatagaatgtttatttagagttgggatctatgtctatgagcgacatggatcacacatttattggtgctgccagctttaagcatatgagttttgatattctatatttttcaaatccttgaatcttttttgggttgaagaagaagaaagcatagctttagaatagagattttctcagaaatgtgtgaaagaacctcacacaacataattggagtcttaaaatagaggaagagtaagcaaagcatgtcaagtttttgttttctgcattcagttttgtttttgtaaaatccaaagatacatacctggttgtttttagccttttcaagaatgcagataaaataaatagtaataaatt

SEQ ID NO: 16820 - DNA, 1865 bp, Homo sapiens
aacctaccaactcatggattcccaagatgtgagctttttacataatgaaagaacccagcaattctgtctcttaatgcaatgacactattcatagactttgattttatttataagccacttgctgcatgaccctccaagtagacctgtggcttaaaataaagaaaatgcagcaaaaagaatgctatagaaatatttggtggttttttttttttttaaacatccacagttaaggttgggccagctacctttggggctgaccccctccattgccataacatcctgctccattccctctaagatgtaggaagaattcggatccttaccattggaatcttccatcgaacatactcaaacacttttggaccaggatttgagtctctgcatgacatatacttgattaaaaggttattactaacctgttaaaaatcagcagctctttgcttttaacagacaccctaaaagtcttcttttctacatagttgaagacagcaacatcttcactgaatgtttgaatagaaacctctactaaattattaaaatagacatttagtgttctcacagcttggatatttttctgaaaagttatttgccaaaactgaaatccttcagatgttttccatggtcccactaattataatgactttctgtctggatcttataggaaaagatactttcttttttcttccatctttcctttttatattttttactttgtatgtataacatacatgcctatatattttatacactgagggtagcccatttataaattaagagcacattatattcagaaggttctaacagggctggtcttaagtgaaccactgtgtatataaatatgttggaaaacagctgtatacatttttgggcaacggttatgcataatatttaccaggagaatttttttcttaacaagccaacatttaaaatttatgttttatgtcaataaaagaaaatatactttattgtgacttcaactatatttcttatcccttacatttttatttaattgtcttagcttaaaaaaagaagaaactgtggaatactacagtaaatattgttttcaaacacaagcaataattcaaatagttatttttcttttgaattaattttagacatattttggatcctattgaggggataagaggatgtcaaaaaagttaaatacctaagtagaaaaaaatatagaaataaagccaagaatctctttcagttcaaatgttatcaattgttaataagaaattgctatctgggatgacagaattacctctgcttagtatctcattataactgaaagaaggtttatcattacaaataccttccaatgaaaccaagaatttctcaaaatatttaatgtcacatattataagaagttacctaatcctgcttcttaacatcaatttttaaaaatatcttaaaattactttgttttgtagtaaacagtgaagaaaagattgcctcctaattatttttttcaatgagtgctgaatgggaaaacatttatatcttactataaaaggttctgttttgtttggaatcaatggtagctttattgactgttctgattgtgctgtttctaatttattgaatctgctaggttttattgatgcagccaccacttaagtgacataaatattatagaaaggtactgtgaaatgatcactttgtggcaggggtacttttaaacataaatgtttctacaaaagtaggttgagttcattgtaaataattgtgaaagccactgttcaaataattttaagattacattaatttttctataaattggaagatttataaatgtttgaaattgtacacattgatatttaatgacaaatttacttaaaataaattgaccccttgttctt

SEQ ID NO: 16821 - DNA, 148 bp, Homo sapiens
atggttttcaatttactgcttaattgggtatttcttgctctcattctaaacatcaatcagaatttatgatgactggccccgtgaatgtacaactttggcaacatctgtaaattcaatacccaatgcttataaatatgtcttaatgacc

SEQ ID NO: 16822 - DNA, 615 bp, Homo sapiens
aattaactgtaaaacccaagactttcatgcaacagtactagtttttttgttagagcctctataaatatgtaatatcatcatgggagccattgaaatgaaattattttattaagagacacaaaaagtattttcagagaatatacttgatggattaaaaatgtgagtagagggaaagctgtaatatgcaattttaacctttttctggtacagtccagagggccttaaattcatgactcaatcaccaagcatgattttacatgtgtaccaaatttcccactcaatgttcttagaaatattaaagaagccaaatgctcttttactaaaccccatctatatttctaggacatgatgatactcttacatatttcagctgtggaggagtttttagcctcaagagatgagaaattcatctacttttagtgatggcaagtgacagaactcagtatggtttttcttctaagcctaaaataagctgggtcctactacttttcattatgtgtaaattagttttattttttaaaaactttctattgaagtataacatgcatatgtatatgtatatgtggagaaacatgaagtgattaaataaaatattcatttgtttgtcattcatat

SEQ ID NO: 16823 - DNA, 261 bp, Homo sapiens
ttccaggtttttcagcctttggactctaggacttgcaccagcagcctcctttgggctttcagccttcggcctcagaatggggcctgcactgtagcttccctggtttgggggatttgggacttggcctgagccatgcttctggcttccctgggagcccctattggcttctgtcattctgcagtttgtagccagcctactgtgggacttcgcctttgtgattgttcagccaattcttcctaataaattcccgtttatatatat

SEQ ID NO: 16824 - DNA, 148 bp, Homo sapiens
atggttttgaatttactagttaattgggtatttcttgctctcattttaaacatcagtcagaatttatgatgactggccccaggaatgtacaacgttggcaacatctgtaaattcaatacctaatgtttataaatatttcttaatgacc

SEQ ID NO: 16825 - DNA, 3668 bp, Homo sapiens
agctgcaaacttctttttactctaatcatttttaaaatactaatggaagaactttctagcactttaccactacataaatgttcattgacttattttattggactcttaccgcataccacttcacacttgttttattttctttagttttgtttcttgttatagaatcattatccatgctcatttttgctaggggaaatatatgaagagggaaaacatactaatgggggtctttctgtgatgtgatgagacatacatgtaagtgtatatatgtgtgtataggcatatatacgtgtgtatgcatcaacacagtatatgtaaaactgtcttaaaaatccattaacttctacctaaatcacctggaaggagagcattactcaccaaaattgcaaaacaagggtatcaagaatttgtgtaatagccagtgacatgctgtagatttttgcaaactggatgtacttagcatgttttctaattctgactggcttttgttaacttgataattcttcatctaccttaaaaagaaaaaaattacacatagtcattcttgatgttataaatagagaaaaagtgtgtgtgagcaataatgcataagctactgataacttgcttacagcagatagcaataaggtatttggtggcattcggcttgttttgtaatagggattttttttttggttgaccactcccccacacttccaaaattaaacagtgttttcttagcatcttgaatatctcctgcggtgtatattaacatcttgatgagacagatttccaggcaacaaaataatttctaaaatggatatatgtgtggattaatgacaggcagtaaatacccattactcctttactcatagctggtaaaattattcccactgttttattgccttttactgtacgttctacactctgtcctactcccacagaattttcaagcccttaagagtttagttaaaataaaatttttgaaattattgtcttaatatttttatataggctgatgtctttgcctcaagattgttaggaggtaattttccattgaattatcaactgtgatttttatattgccctccaagtggtagaagaagattgcaaagtccatgttatgctaggtgcacaataaatctagtaatagccccacacagatctcatcattgttgctacttccttttgtattttcatcaggtatttttttaactgtagggtttttacttttttcttggagcagagagaacaggctgtaaatgggttgccaacataagctggctgagaaataaaagaaaacaagacagttgttcataaagtttcattttgtatgcactgatggcaaattcattaggtcagttaagggaaatatttgtaccacttccaaacttttcagcgttggataaaatgattgatgaggcaggcagaaggaatgtaggtttcaggtgtgtcatttcctgctgcttccagctccatccctacagactcctccccgagtcctgccctggaaccaaaggaaggaggaacactgaggggaatcctgaagtaggagtcagatgacctgaactcagatctccctctatcacatgcttgccaccactgtaccttgagcaagaatcatatctgaccctcaacctcctcaactctaaaatggggataacatcatttgtcctgcacttctctaagggctttacaaggatcaaataagatggtgtgtatgtaagaaatttgtaaaatgtgaagagctatctacactaagttcgtaatgttattattattgtgcttcatggagaattttcccctctgttttcctaaattgtatgagagctttcacacagtgagaaatagagcaggctgccccataaatgggtaacatattcctaatctgagtgtgtgggctgttagagaacccctgccatgctctggtctgttctgaaactgtgccaactgaaagatgatagtccacacagcacaaacaggtttaagcaaatgatagaaagggaagtaaggcgtgtgtgctagttaataggtttagtagcttttatggactaaaaatgattgattgtatcttgaccctggtctcagaaatgacatttttacttttgccatgagtacacatcagatatctttggcttctatttaaagctaaaggtagaagtgtttgatccagtgaactgtgtatgtatgtgtggggtttttttctttatttttaaatgaaaattaagacaccttttgtgtggacatgtttttgtctttaatgtcaggctttagattagaccagcagttttcaaagtatggccaatggacccctgggttccttgagagcctttcaggggggactatgagatcaaaatatttttattataatgtgaagacattgtcttttcactctatctcaaaaaaagtgttgcaaatgtaaaacattgccatcttctcacaaatctctttttttgtttttgaaaatatggccatttttcataaaatgttatttgtgttagcatgtaatgggtttactatgtttaaataagttaatactttaaaaattttcaggtttttttagtatggtgaatattgatagatataaacctcatgaacaaaagtactttggcatccagattctcaataaatgttaagagcgtaagtgtaagggggtccagagaccaaaagttttagagctacaggattagacataggagcaggatattctgttagtgtgatttcttgcaactttattttacattttaaactgctgatattggatataatgctgctttttagagacacctaaattgcagtatcagaatgaatgttgatgtttgaagccaaaaagccaaatgcttaaactgatcaatgactgtagctttttagactgttggtcaaagaacattctacttcacagtaatagctctatcagccacagatctcatggtggctgttgcatgataatgataggataaacaaaataccactgtcttcaagaaacattatcttaggtttgtttgtttggtttgagtttgatttggcttttatattttttaaaatcccttttgctaccccatctggttttataaactgagtttcttagcattcgttaaaattaaggggtttgtttggaataatatatattttttatgcttttgtctttcttacctgattgatattacattcacctttgattgttttttaaaagtttatttttacagaatatatttagtacctttcttaaggagtaactgaattgaatcaaccagtttgcatttaaataaaagaacaggctcagtggtcttcctgtagaatggtttacatgcctgcatgtgcagtagttgtgtctggaatcctagaattggcactttctgcctccttgctctaaatgtcacaaaaaattatacttccttaaagtaaatgtaatgatttcttcttttcctattgaccagtacagatagatatgttgtgtttgcttcatttttaatgatgacttcaagattgatgatgtgatccaataactgtggaggtagctttaacttggttctgtgtaaatagtatgtattttattataatatttctcattttaagatgcttggtttacattaaattatggtatttaactatttttatgtttatactaggtagggtctttcttatgtttctgtgtttttggtatgctaaataaagctatttttaaaccc

SEQ ID NO: 16826 - DNA, 1843 bp, Homo sapiens
gtttgctcaattcttatttaccgaggaattcaaggccggttctcgggtccttgaaagtatatacagcttgtatgaaggcttctctgggacagtgtgctttctgattgacctgctgcagcccaatcaggctgaattcccactcttcagcgtctttgtttagaaggctctatcttccactgtggccctgcagagatcccctgagccaagccgaggcagtttccacataagccacattcaatggtatcgcaaccatgagccttaacattgccatcagaaggaaggaatcaggcaggtgaaggcaacatgatgccagatttgagaaaggatctgcaaaataaagataccacaattcatcttaaaactgcagagatttaatgtgtcagggaatagatgtgaaacaagggatcataggaaaaggggaaagagaaatgatctgtttttcagttatgacatagaaaaccaaactgcaagtgtagactatgacaaaaaatacactaatacctttgcaatctgaatgagaatttgaccatttgtgtgtgccctctacccttaaattcagaaataaagacaataaaaaattaaaataattgcccagctgaaaactgctatgaggaatggattgtcaggttgctgaagtataaaaataaactcttggttgtcctgtgcttatacttattgaaatttatggtttttactgagcaaagatatttgcatatgaatctctatttttttcattaccctgggcaatttaaagaaatcatatcatagcgtagttcagatactaaaatttgaagtttccttaggccctagaacatctcttttcctggttccttttttttcctcaaagctcaattagaatagcaaaatttataagctagtaaacttatactatagcaagtgttgctgtaaagtgtttttctccataggaagtgtgaactgtgtattgtctattgttagtaattttaaaaatgcctttatgtacataatcttgatggagctattagctgaactataaaatatgctcttggtaaatatcactaatttcaaagatcaggggaaccactacaaagacgtgtcatttctgcctttgtttgggacaggcagacaggctgaggaagtcaccagtgattgtggaaataattttgctccattttatactattaaatgaagagatgagtgaattctgtggttggttaccttaccttccaagatacagggtccactagaaattggctgtaatactcattgagccaagttgtcatatcaaattcaaccctgctgtaaacacatagaagttgtgaaactgcttcaagtaaatagtggtttgcagaacactgtaggagcatctgtcacttcattatgcagagcataagttgatccttttcctagaattttgtcagtggcaattgcatatatcagattgagtaggaaattgtgtactgtataagacttatttaaatagtcattaaatatttggatatattatgtgtgtgtgtgtgtgtgtgtgtgtgtgtatggtgtgtattccatatctattcccatgtaaatccaaatacttattctttatttcagtaattcttaacttgaatcatagactttggaacgagttagggaatgctctgttgcctaaaaagcaaacctacaagtatgttggtgtgtgtatgtgtatggaccagtttgtttgtgtgtgtgtgtgctcattttgaggggacaaggatctctagcattcataacattctcaaagaatctgaccaaagaaaggtaacaactatctttgtgtattttatgactgtgtgtgtttgcactcattgcaataaagtaggacaaaatgattttgaaatgc

SEQ ID NO: 16827 - DNA, 3667 bp, Homo sapiens
tgggacccaaggtctcagagcacaggcatattattttctgggtttgatactcgttattcatacaaataatgagccctacacagggaacaaggcaggaagttagctgttaactccttgtgagctgcttctctttatagagctcttgggtatgtagaactgtatgggaagaagccaggaaaacctctgagtgttgaaggggcaacccaaggcatcacagttcacaggtaaccatgttgtgttcttctaggcattactggccttttcactgacaagttacccctgaaatctgagttgtactggttagattcattaggttgaatgaggagaggggcttacctgttctctagttttccagactgctggtttgggtaacctgaagttttatgatccctgaacatagttttcacccaagagctgtcctggtgaccaaaaaagattactagggttttgccatcagcaacatcattcctgtcagagctttcagggagggctgttcaagtttggtttttgaatagacagaggtttcattttcatctcattagggcttttttgtacatagccaactgtagccaccctggcatgctgtctctaattgattcaagggcctagatttggagactttgttccttagcatccatggatgcagaaatgagtgataaatttggccatgaaagccctggaattttaggaaagttgtgattctttgatatgttgatgaaattctggatcaggaggggtgttaaaacatcaaaatgatggcgacttgtataagtagaattcttaccatcttactcctgcctccccattccttgcctgtcaggaccattttagaagagttaccttggttaacttaagggttttttagaaaaccccacagaaatctctcacccagttcaggtgtatagggaattttcattttcattatttcaaggaatagagttttcctcactaccacttgtaattagagattgacttcagaaactttttctaaattataaagacggaatgaccagaaaatttttgtctttcatggaatgcaatttgacttggcataattgtgagttaatttgataaagatctccagttgtatcctctgacaccctttaatgttctatataatttttcctttaatcggagaccctatttgtttcattaaagaggattgggtagcatatcctcaattatcttggaaaaatgcgtagatctagtgccattatttctaccattaaaatcttgaaagcgaaatacttgaaaagaggtgaccataaagatcacaccaatttagaatgaatattaaagtctgagaaatttacaaaagggactctatggactcgattttaccatatggaatagggatccacttctctgttaacctacaaaacgtatttatctggccattgcacttcggataattttcatttttaattcctcttggtgtcaaatttttaagtaatttcatgcacacaggagaaaatgcaatttgataatcagtttccactacattcggaggtcaagaaagcagtatatattctttcacaaggcatccatactgtttaatatttatagagttcatagaaatacatcaataagctcctaaattatagagcctcaattttggtttttctcatttgaaatgtttttgatttatcaatatttgtggtttaactttgtgggggtgtccaggcagtagatcattttttgtctatttttaaccaaataagaataacactcaagactatgttctccatcccaacacatcacttaccacttgcactattcttaataggcctaaaatagtgagcatatataatcaaaataatacttcatacaacatatacttccatgcactcttcatgtaatcacatatgtgcatagatacacaatcgtattacataaaacacccttgaaaatatatgactttgaataaaataaagctaccatgttaatacatcattttttgtttcttcctaattaacaaaagggctctataatgattaggagagctgtaaggccattctttagtcattccaagtgtatatttgtatcacaccagttacttgtgttcattgacaccaaatattttcaagctttttgtgagaaagagattcttgccttgaggctctgcagtggcaaatggtaggggcaatagcgctcccttttcacctgaaatgccttcagctcaggccttgggagtgaggtgtgggagtagccaccagcctcccactgactaggcatgttaggaattagacaaggatggagagactggttttttccagccttggtttggaagcttgtctcaaaaaccattacaaaatcttaaccttcaaatacattctaaatcactttaatttagaagataggtgagcaacttgagtgatcccaaaccaaactaacagtgctggtttgtccgacacccaaagcccacttcacacatttataaggacagagatttggtaactcatttgggtattttgtcagttttaacccttaatatacaggtatcccagctttgggcacatgtatgtccattcactttcaggaaggggtgtcagtactttctttctgtgtggtgaaaacataagccatggtgaactgataatttttgtttttaaattatttatattactgaattggcaaaattacagttcacactgcagagctaggttgtcctattggcataaaacaaaccagcaacttttctcatgtgtttggagttaaaatgtgtttttcagttataatttcaatttttaaatttcttggtgctttgtctaattaattacatcccataacttgtcaggatagttgctccaactgaattgctatcatttggctggatgggggtgaagtatgtcttcaaaatatattgaagtaagttcatcaaacatgtttagacttcctctcattgctggagacagcccagtgtagagattggcacttccctgtccagcactacaacttaattgctctatgcctcagtttccccataatacccttttccaacctacctcacaaggttatcagaaagatcaaattaaataatagatgtgaaaatgctttgaaaatgtttttaagtgctatgcatatttatagagttattatagttattcaaatccataagcaggttatttttatttttttactgtttgaaaagaaataagtagtgtcattcatatgagttcctgagtggatatgcgaatctttggtcttctcgacaggtgccctttctcttaccactagttgcttacaaaaatagcacccaaacacatggcacttggaagaaaaagacccactgaatctgagaaagtactttctggtggcaaatgaatttatcattttagtatagttttcgataaaggatatagcaacatcttttgataattgtgctttacaacttgaatgctgattcaaggcattatttggatgtgagtttaatcttttcagccttgtaaatgggaaaatatatattaaaattgattgtcaaatacagcatttctttggaaaccaccttaaaacattagtgctatggttatgagtgtatgtgccagtacttaccagtcaatgcattgtggatatgagctttcgttgactgcttctctgcagtcgttgatgctaataaatattgtcctgtttcttcatataataaattaatttttcaatttctccttgt

SEQ ID NO: 16828 - DNA, 2544 bp, Homo sapiens
cttgtctcttccatgaggaaataaatgtgggttgtgctgccaaatgctcaaataatgctaattgataatataaataccccctgcttaaaaatggacaaaaagaaactataatgtaatggttttcccttaaaggaatgtcaaagattgtttgatagtgataagttacatttatgtggagctctatggttttgagagcacttttacaaacattatttcatttttttcctctcagtaatgtcagtggaagttagggaaaagattcttggactcaattttagaatcaaaagggaaaggatcaaaaggttcagtaacttccctaagattatgaaactgtgaccagatctagcccatcttactccaggtttgatactctttccacaatactgagctgcctcagaatcctcaaaatcagtttttatattccccaaaagaagaaggaaaccaaggagtagctatatatttctactttgtgtcatttttgccatcattattatcatactgaaggaaattttccagatcattaggacataatacatgttgagagtgtctcaacacttattagtgacagtattgacatctgagcatactccagtttactaatacagcagggtaactgggccagatgttctttctacagaagaatattggattgattggagttaatgtaatactcatcatttaccactgtgcttggcagagagcggatactcaagtaagttttgttaaatgaatgaatgaatttagaaccacacaatgccaagatagaattaatttaaagccttaaacaaaatttatctaaagaaataacttctattactgtcatagaccaaaggaatctgattctccctagggtcaagaacaggctaaggatactaaccaataggattgcctgaagggttctgcacattcttatttgaagcatgaaaaaagagggttggaggtggagaattaacctcctgccatgactctggctcatctagtcctgctccttgtgctataaaataaatgcagactaatttcctgcccaaagtggtcttctccagctagcccttatgaatattgaacttaggaattgtgacaaatatgtatctgatatggtcatttgttttaaataacacccaccccttattttccgtaaatacacacacaaaatggatcgcatctgtgtgactaatggtttatttgtattatatcatcatcatcatcctaaaattaacaacccagaaacaaaaatctctatacagagatcaaattcacactcaatagtatgttctgaatatatgttcaagagagagtctctaaatcactgttagtgtggccaagagcagggttttctttttgttcttagaactgctcccatttctgggaactaaaaccagttttatttgccccaccccttggagccacaaatgtttagaactcttcaacttcggtaatgaggaagaaggagaaagagctgggggaagggcagaagactggtttaggaggaaaaggaaataaggagaaaagagaatgggagagtgagagaaaataaaaaaggcaaaagggagagagaggggaagggggtctcatattggtcattccctgccccagatttcttaaagtttgatatgtatagaatataattgaaggaggtatacacatattgatgttgttttgattatctatggtattgaatcttttaaaatctggtcacaaattttgatgctgagggggattattcaagggactaggatgaactaaataagaactcagttgttctttgtcatactactattcctttcgtctcccagaatcctcagggcactgagggtaggtctgacaaataaggcctgctgtgcgaatatagcctttctgaaatgtaccaggatggtttctgcttagagacacttaggtccagcctgttcacactgcacctcaggtatcaattcatctattcaacagatatttattgtgttattactatgagtcaggctctgtttattgtttcaattctttacaccaaagtatgaactggagagggtacctcagttataaggagtctgagaatattggccctttctaacctatgtgcataattaaaaccagcttcatttgttgctccgagagtgtttctccaaggttttctatcttcaaaaccaactaagttatgaaagtagagagatctgccctgtgttatccagttatgagataaaaaatgaatataagagtgcttgtcattataaaagtttccttttttattctctcaagccaccagctgccagccaccagcagccagctgccagcctagctttttttttttttttttttttttagcacttagtatttagcatttattaacaggtactctaagaatgatgaagcattgtttttaatcttaagactatgaaggtttttcttagttcttctgcttttgcaattgtgtttgtgaaatttgaatacttgcaggctttgtatgtgaataattctagcgggggacctgggagataattcctacggggaattcttaaaactgtgctcaactattaaaatgaatgagctttc

SEQ ID NO: 16829 - DNA, 274 bp, Homo sapiens
tgttgtgttacttgtcaagaaagaagcaatgttcttcagtaacagaatgagttggtttatggggaaaagagaagagaatctaaaaaataaacaaatccctaacacgtggtatgggtgaaccgtatgatatgctttgccattgtgaaactttccttaagcctttaatttaagtgctgatgcactgtaatacgtgcttaactttgcttaaactctctaattcccaatttctgagttacatttagatatcatattaattatcatatacatttacttc

SEQ ID NO: 16830 - DNA, 979 bp, Homo sapiens
tctttcaagaatgacggaataagagacctgttttaaaaaggaactgcagcaatctttgaaagacttccaaagaatgttagagcacagtacataatacacttgccctgctccctctcccccttaccccacaacgtgcaactgacactcccacccagtctctgctccacctttcagcccacgtcacgtgtagtgtccattttgtgaagccctgttgtgccacagagtgtagccaggtccccctgcagctagtcctagtgaacctcaccccgaggccctgcatgggccagcccctccatctgtacttggtccaactgcaactcatcatcggtgactggttatcacaccatcgctggcccctttgggccctgcatgtagtgtgggaggctcctgttagctcctcactgtggtaaatgccacacacctttaagtagataagcagacgatagttatctgttcttttgacttaatctcatttggtttgattttccctctactaaggctttcctaccttcttcaggctgcctaagacatgtaacgaaacacttcaataattgtccatgaggagaaaaaaagcatgtgtcatgcatgaaggaaactgaacttgaggtggcctccttgcttgttacatacctgggtatgtgtaggcagtttagtgcatctttgcctctcggttgaaacctgtataaccctgttacaaagctgtgttgttgcttcttgtgaaggccatgatattttgtttttccccaattaattgctattgtgttattttactacttctctctgtattttttcttgcattgacattatagacattgaggacctcatccaaacaatttaaaaatgagtgtgaagggggaacaagtcaaaatatttttaaaagatcttcaaaagtaatgcctctgtctagcatgccaacaagaatgcattgatattgtgaacatttgtgatatatgtattaataaatagagcaattacaagc

SEQ ID NO: 16831 - DNA, 1032 bp, Homo sapiens
ggcgtggcgcccgtggctgcccagcaccttcttcgacccatctcaccctctctcattcctcaaagctttttttttttttcctggctggggggcgggaagggcagactgcaaactggggggctgcgtacgtgcaggaggcgcggtggggctgcgtggaggagggggccacgtgtgagagagaagaaaatggtggccggagatgggagggcccaaggaacctcctgggagggggcctgcattctatgttggtgggaatgggactgggctgacgccctgcattcagcctgtgcctttcctggggtttcttttctgttcttttcggaggagagggcccgagaaggggccataccagggcgcggcgctgggttgccacacttgggaaagcagcccggagctgggtgctggggaaggcggggcgcgtagcctcccgccgccctgcggttgggccggtggaggcccaggcgttgctaggattgcatcagttttcctgtttgcactatttctttttgtaacattggccctgtgtgaagtatttcgaatctcctccttgctctgaaacttcagcgattccattgtgataagcgcacaaacagcactgtctgtcggtaatcggtactactttattaatgattttctgttacactgtatagtagtcctatggcacccccaccccatccctttcgtgccactcccgtccccacccccaccccagtgtgtataagctggcatttcgccagcttgtacgtagcttgccactcagtgaaaataataacattattatgagaaagtggacttaaccgaaatggaaccaactgacattctatcgtgttgtacatagaatgatgaagggttccactgttgttgtatgtcttaaatttatttaaaactttttttaatccagatgtagactatattctaaaaaataaaaaagcaaatgtgtcaactaaattggacaagcgtctggtcctcattaatctgccaatgaatggtttcgtcattaaataaaaatcaatttaattgatttactagcaa

SEQ ID NO: 16832 - DNA, 879 bp, Homo sapiens
atgttacctgtgccagaattagaaaagggggttggaaattggctgttttgttaaaatatatcttttagtgtgctttaaagtagatagtatactttacatttataaaaaaaaatcaaattttgttctttattttgtgtgtgcctgtgatgtttttctagagtgaattatagtattgacgtgaatcccactgtggtatagattccataatatgcttgaatattatgatatagccatttaataacattgatttcattctgtttaatgaatttggaaatatgcactgaaagaaatgtaaaacatttagaatagctcgtgttatggaaaaaagtgcactgaatttattagacaaacttacgaatgcttaacttctttacacagcataggtgaaaatcatatttgggctattgtatactatgaacaatttgtaaatgtcttaatttgatgtaaataactctgaaacaagagaaaaggtttttaacttagagtagccctaaaatatggatgtgcttatataatcgcttagttttggaactgtatctgagtaacagaggacagctgttttttaaccctcttctgcaagtttgttgacctacatgggctaatatggatactaaaaatactacattgatctaagaagaaactagccttgtggagtatatagatgcttttcattatacacacaaaaatccctgagggacattttgaggcatgaatataaaacatttttatttcagtaacttttccccctgtgtaagttactatggtttgtggtacaacttcattctatagaatattaagtggaagtgggtgaattctactttttatgttggagtggaccaatgtctatcaagagtgacaaataaagttaatgatgattcc

SEQ ID NO: 16833 - DNA, 2550 bp, Homo sapiens
gcctgctttgcagtaggtcaccctgccaaacaagctaatatggaaaccacatgtaacttagccagactataccttgtgtagcttcaagaactcgcagtacattaccagctgtgattctccactgaaattttttttttaagggagctcaaggtcacaagaagaaatgaaaggaacaatcagcagccctgttcagaaggtggtttgaagacttcattgctgtagtttggattaactcccctcccgcctacccccatcccaaactgcatttataattttgtgactgaggatcatttgtttgttaatgtactgtgcctttaactttagacaactttttattttgatgtcctgttggctcagtaatgctcaagatatcaattgttttgacaaaataaatttactgaacttgggctaaaatcaaaccttggcacacaggtgtgatacaacttaacaggaatcatcgattcatccataaataatataaggaaaaacttatgcggtagcctgcattagggctttttgatacttgcagattgggggaaaacaacaaatgtcttgaagcatattaatggaattagtttctaatgtggcaaactgtattaagttaaagttctgatttgctcactctatcctggataggtatttagaacctgatagtctttaagccattccagtcatgatgaggtgatgtatgaatacatgcatacattcaaagcactgttttcaaagttaatgcaagtaaatacagcaattcctctttcaacgtttaggcagatcattaattatgagctagccaaatgtgggcatactattacagggaaagtttaaaggtctgataacttgaaataggtttttaggagaattcatctacttagactttttaaatgcctgccataaatgaaattgaaatggtagaatggctgaccacagcaatgaccagccctcattagggccctggatgatttttggtctaataacgcatgctagtgttgatgttttttggtcaagagggtatgaacaggaagaattaaatgcagcaggctttattttaaatgccgattcacattactctgttcaagctgcgttgagatgttaaactggcttactatagacttcgtaaaaatggctccagaagagtaacaaactgaaatctttgagatcacacaggttggaaatatgtacataactgcacaaggtgtcaattctgctctacagtgcagttttagtcagttttagttgcataggtttccattgtatttatagtctgtttatgctaaatctggccaaagatgagcattgtccaccactaaaatgcctctgccactttgaattctgtgctaattttgtggccagaatgcggtgatcaaaacgctccatctttttacagtggcataggaagacggcaaaaatttcctaaagtgcaatagattttcaagtgtattgtgccttgttctaaaacttttattaagtaggtgcacttgacagtattgaggtcatttgttatggtgctatttcaattagtctaggtttaggcccttgtacattttgcccataactttttacaaagtacttcttttattgcacattcagagaattttatatatatgtcttgtgtgcgtgtccttaaacttccaatcttactttgtctcttggagattgttgaacgcagcttgtctaggaaggggatgggactagattctaaaatttatttgggaccatgggaatgatagttgggaagaaaactatttgcacacgacagatttctagatactttttgctgctagttttatgtaatatttattgaacattttgacaaatatttatttttgtaagcctaaaagtgattctttgaaagtttaaagaaacttgaccaaaagacagtacaaaaacactggcacttgaatgttgaatgtcaccgtatgcgtgaaattatatatttcggggtagtgtgagcttttaatgtttaagtcatattaaactcttaagtcaaattaagcagacccggcgttggcagtgtagccataactttctgatgttagtaaaaacaaaattggcgacttgaaattaaatcatgccaaggttttgatacacttgtcttaagatattaatgaaacacttcaaaacactgatgtgaagtgtccagattctcagatgtttgttgtgtggattttgtttagttgtgtgtttttttttttttttcagtgaatgtctggcacattgcaatcctcaaacatgtggttatctttgttgtattggcataatcagtgacttgtacattcagcaatagcatttgagcaagttttatcagcaagcaatattttcagttaataaggtttcaaaaatcatgtaaggatttaaacttgctgaatgtaaagattgaacctcaagtcactgtagctttagtaattgcttattgtattagtttagatgctagcactgcatgtgctgtgcatattctgattttattaaaataaaaagttgaactgcacagtctcctttgttgttgtcaattgtggtttattttcagaggtgtaaataaagtgctcttgcctg

SEQ ID NO: 16834 - DNA, 811 bp, Homo sapiens
cctggccagaggggggaaagtttgcttaactgggcttgagtgtgtttgtggtaaggggagaggagccggaatggagggcagaggtgaaaatcccagtggagggtggaaggaaccgtttgcctccagagatggccccagggagaacacagggacgtgccactcgagggggaggatggtatggatttctgcttttgtcacacgggcatccattggaaaagagaagcaagaatgaacgtgggccctcgggtgggaagactaggaatcggaagcttctagggcttcacatcccttcccctcccctccccttcccctcatcttccaggcaacagtgcctgcaaggcctgaattagagagacttccattggctaagtagttaagagccgtcccatttctcctggcggggtaacccattacaccgaagtcctttgttttctaccacaatcctcctcctcctctccaggggcctggaaacactaggattcaggaaggtaggcaggacgtgagagaagggagatgggagagagatttaagacaaagggtggcggtggttcctggggtctgagatgtgttaggaggcgtttaaaacaaagatccagttcatttactccacagttattcccagggctggccctagccacaaaggaactttagggcagggtagggaaaaaaggggcagcagggggtgtgtttgtggacaaataaatttgtaaagtccgaggattaaaaaaaaaaaaaggttaaaccggtttctctactgctggacttttcagagtctttcatatgctaacattcattgtgaatctcccaagag

SEQ ID NO: 16835 - DNA, 498 bp, Homo sapiens
ggtaaacatactaaaatgaattatataatgcagcctcttaattctttgaagaactaaaaaattaggaaacaaagttctagcatttacaaaactcagatctcaaagctctgcttgtatttgtgatatttcatttgcttaactgtaaaccatttcaaggtactaacttttaaatctgtatgtaaaatcttttcaaaatacatttttaagctaatactcttaacatagattatgaagttaagtgaaatttatggctctaacagcaaaataattaaagtgccatagtttctcaagtgactaaagtagttattaaaatcaagcacttgatactaatttgaagtgtgtttaaaagtaaatgatttgggaactgacaatgtgtcagaaaatatatgttcatttatcattttaaaatcttgtataatttgccactgtattcatttatgcctaaatctctataacagatgaaaagataattaataaaatcctaattaaaaaatgaga

SEQ ID NO: 16836 - DNA, 159 bp, Homo sapiens
cttttgaatggaaaaccccacaatattaagaaaagcattcatgtgactttattagggacactaaactacatcattaacatgtcacagcttggttgacaataatcaccaagaaaatctctttggtttttaaaaataaataaacatatattcataaaactc

SEQ ID NO: 16837 - DNA, 2307 bp, Homo sapiens
agttctgttcttatgctctctgctcactggttttcaataccaccaagaggaaaatattgacaagtttaaaggctgtgtcattgggccatgtttaagtgtactggatttaactacctttggcttaattccaatcattgttaaagtaaaaacaattcaaagaatcacctaattaatttcagtaagatcaagctccatcttatttgtcagtgtagatcaactcatgttaattgatagaataaagccttgtgatcactttctgaaattcacaaagttaaacgtgatgtgctcatcagaaacaatttctgtgtcctgtttttattcccttcaatgcaaaatacatgatgatttcagaaacaaagcatttgactttctgtctgtggaggtggagtaggtgaaggcccagcctgtaactgtcctttttcttcccttaggcaatggtgaactgtcattacagagcctagaggctcacagcctcctggaggaagcagcctccactttggatcaggaaatagtaaaggaaagcagtgttgggggtagcggcatgcagaccctcagaccagaatggggacatcttgtggtctgctgcctcaggaatctcctgaccacttgtagtccctccgacttctctagacatctagtctcagtgctagcttatttgtatttttcctctttcacttcttatggaggagagtgtttaactgagttagaatgttgaaactgacttgctgtgacttatgtgcagctttccagttgagcagaggaaaatagtggcaggactgtcccccaggaggactccctgcttagctctgtgggagaccaactacgactggcatcttctcttccccctggaaggcagctagacaccaatggatccttgtcagttgtaacattctatttcaacttcaggaaagcagcagttttcttttaatttttcctatgaccataaaattagacatacctctcaacttacatatgtcttcaacatggttacctctgcataaatattagcaaagcatgccaatttctcttaagtactgaaatacatatgataaatttgactgttatttgttgagactatcaaacagaaaagaaattagggctctaatttccttaaagcaagctcacttgctttagttgttaagttttataaaagacatgaaattgagtcattttatatatgaaaactaagttctctatcttaggagtaatgtcggcccacaagggtgcccacctcttgttttccccttttaaaaactcagatttttaaaagccctttccaaaggtttcaactgtaaaatacttctttttacaatgtatcaacatatttttatttaaggggaattaacaattgccagggaaaccagccaacccaagtttattatatcattaaccttatcataaattcaaacctaagttgctggaccctggtgtgaggacataaatcttccaaagttttgcctatcctaagagctgcatttttctactgctctttaccttgcattttagctaatttaggagttttgagaatgtattggatacgctccagtacataaggagttgccgcatattatatcagactgctttgagaaatctcatccctagtctattgcagttgtttctattagcttactgattaactcagtcctgacacaccttttgggaaatgctgatttaaacttcttaactggcaacagttggaacagtaatcagtttgctaacatatttaaagtcttgaatgttgaagaactcatgtgatttacccttttcaactttttggaaaacgatttaatttattctaattagattaaccctattaatctatggattgggtatcaaaatgaatgccagtccagatgtgcctagacacgaaattggagctgaggactctcacgatatgcaagttcatccaacgtgaagataccataagctttttctctgaaccagagaaatgaaagtcagtttaagaggctgatagatcttggccctgttaaggcatccacttcacagttctgaaggctgagtcagccccactccacagttaggccaagaattagattttaaaacttcatctgtctgtcccagttaactgttaaataaggcctcatcctccactgaagagtatggattgaaggattgtgaactatgtttagtgtgattgtgaacttggtgcctaatgttccatgtctgaagtttgccccagtgctacacgttggagtatacctatgtgtgtgctttgccactgaagtaagattttgcctgtatggtactgttttgtttgttaataaagtgcactgccacccccaatgc

SEQ ID NO: 16838 - DNA, 181 bp, Homo sapiens
gccatcccggccagcccctgacatctgccatcgatcttgcaccaagactgaacttgaacactgacattttgttagtaaagaaaaccggatggtgccttgttaaagggcaagaaaaaagggagggggttggagttttgaacgtagtaagccttaccttaatagaattaaattcatgaaacat

SEQ ID NO: 16839 - DNA, 1187 bp, Homo sapiens
tattgttccatggacattaaatgagaccttttctgctattcaggaaataacccagttctgcaccactggtttttgtagctatctcgtaaggctgctggctgaaaactgtgtctatgcaaccttccaagtgcggagtgtcaaccaactggacgggagagagtactgctcctactccaggactctcacaaagctgatgagctgtacttcagaaaaaaataataatttccatgttttgtatatatctgacaaaactggcaacatcttacagactactgacttgaagacaacctcttttatatttctctatttctgggctgatgaatttgttttcatctgtcttttcccccttcagaattttccttggaaaaaaaatactagcctagctggtcatttctttgtaaggtagttagcaattttaagtctttctttggtcaacttttttttaatgtgaaaagttaggtaagacacttttttactgcttttatgtttttctgtcttgttttgagaccatgatggttacacttttggttcctaaataaaatttaaaaaattaacagccaagtcacaaaggtaatggattgcacatagactaaggaataaacttcagatttgtgatttttgtttctaatcttgatgtaaatttacactatttataaatacatatttattgcttgaaaatatttgtgaatggaatgctgttattttttccagatttacctgccattgaaattttaaggagttctgtaatttcaaacactactcctattacattttctatgtgtaaataaaactgcttagcattgtacagaaacttttattaaaattgtttaatgtttaaagagttttctattgtttgagttttaaaaaagactttatgtacagtgcccagtttttgttcatttttgaaatctgattatatatattttatatatacttatgtatgtatatataatatatatagaaatctggatatatatgtataaatctttagaacttaaatttttctcgttttaagtttcacatctatggtagatttttgaggtgtctactgtaaagtattgcttacaaaaagtatgattatttttaaagaaatatatatggtatgtatcctcaagacctaaaatgtcagactggtttattgttaagttgcaattactgcaatgacagaccaataaacaattgctgcc

SEQ ID NO: 16840 - DNA, 1626 bp, Homo sapiens
tggatgtaaagcatattggaaagtatgcttccattataatcttcataaagctcaacctgcagagagattttttgaccctaatcaacgagggaaagccctccaccaaaagcaagcccttagaaaaagtcagagaagtcaaactggggagaaactctacaaatgtactgaatgtggaaaagtgtttatccagaaagcaaacttagttgtacatcaaagaactcacaccggagagaaaccttatgaatgctgcgaatgtgcaaaagccttcagccagaagtcaaccctcatagcacaccagagaactcacacaggggagaagccctatgaatgcagtgaatgtggaaaaacctttatccagaagtcaactctgattaaacataagaaaattcatatggagagagaccctataaatgcagtgtctgtgagaaagccttcagtaggaagtcaactctcattaaacatcagataattcatatgggagaaaccttatgaatgtaataaatgtgggaaatcttttagtgttaaatcaactctcattgtatgtcacagaacataaatgcataagttgcatgctattgtgaatagtgtgatgaaattttgcactgtcctgctctttcctgctcaggatgcaaatcagtgaatctttttttttttttttttgagacagagtcttgctctgtcatccaaactggagtgcagtggcacaatcttggctcactgcaacctccgcctcttgggttcaaccgattctcctgcctcaacctcccaaatagttgggattacaggcacatgccaccatacgcagctaatttgtatttttagtagagacagggtttcaccatgttggccagcctggtcttgaactcctgacctcaagtgatccgcctgcctcagcttcccaaagtgctgggattacaggcatgagccactgcacccggcttgaatcatccttttgtccagtattatatccatgctgtatatgctacccgcccactagtcccttagctgtctcagttgtcagattgactgtcatgggattgcagtgcttgcattaaagctacccttattgtataatgaccccaaagtgcaagagtagtgatgttggcaatttgcatacaccaaaaataagttataaagtgcttccttaaagtgaaatggttaaagttcttgacttaataaagaaaaaaaatgtatgctgaggttgttaagatttacagtaagaatgaatcttctatccaagaaattgtgaaggaggaaaaagaaacttgtgctagttttgctgtcacatctgaaactgcaaaagttgtggccacagtgcatcataagtgctaagacgaaaaagacattaaatttgcggatggaaggcgtgaatagaaatgggttctgacagcaatcaggttcggtactattcacagtttcaggcatccgctagggatcttggaacatatcccccatggataagggaggggtactgtaccttgtcatattgtgcattaaagaattcattgagtgtaatcatgtaagtctaacacacatttaaaaagctctcagatatcatttcgccttcggttgatgtaagaaaattcaaaagctactcaaatcattcaataaatgataaaattattt

SEQ ID NO: 16841 - DNA, 643 bp, Homo sapiens
gtcagtcaccacgaacaggggcactcggcatgctgccccagcactggagaagcagcgctgtgggggcaatctgtcacactctcagagtctgggacttgacttgctaccaacaactgctgtgcaattctgctgagcaggaatatcatgagctgttcaataatgacggacgcattggttgagatgaagtttccagtaaggaagtgacagtgcaatgtggatatttatggctgtaaaataggaagagctttagttcccaggctgaacctgccactgctggagccatttcaacaaggcatcctcacaacaaagaagagatgtgatttggtaccatttcacaccagcaggtgtctggacgaaaacatcaatgtgaataagggccaagtgcagtcctgtcttgattaaattacttaataatattattaaataataataggtctgggcagtattgtttttaacctgactcatccagctgtccttcaaatagctccgtctccctctacccagaactgatttttaaaaagaagtaatttttctccctgggctgggaaaaccctaatgaactgaaacacacttttactttaaaatttttctgtctggcgtttttgtaatcatactattaaatgactctggagtcatgttaatg

SEQ ID NO: 16842 - DNA, 2585 bp, Homo sapiens
agtgcaatgtggaaccaggacttggtattaagcctttcccaacttgtgaatatagaatttgataatacacttttgtgtattagcaatggtttttactaatgctaaaacttttaaagtttattttttaataaattgttgagtattacatcatttacttgaggttcaaaaataattcattttaaattaagtagttttaatcagcttaaaagctatttaacccattttaataagcttgcagttttgtttctctgcatatgatattcttattagaaaacagaagtagctaaaagtttattattttaatcctatttaaatgttctttcaaatctctaataatttaaactttcctcagtgctccatgatactttttttgagactccatatcattgcttattttacctttttcaatttagagggatttgttactagtcgatcaattagaatgaacctatgcacatttttatgtacacatatccagttatataattgcttcctagttgcattatatggcaaatgagattttgtacatggagttgacataatactttgtaaattgaattttttaaagaaataggcatttgataaccagcttggcaagtaactctactaacagatgttggtatagctatttaaagactacttcgtaagtagtatgattatttgaataaattacacattgtttagttttttaatacaactgctatatgactcttctgcttcctgataagaaaaggtatatgcaatgctaaaactgtagaagcccaatcaccagcagtttttaaaaaggtgataacttttattagctcttgtgggctatcaagagaattggaacaaaaccttgtgacttttaggtaagaaataggcatgatgataagctatgcagattattaaaaagcttgatacatttgatttttcattagatatgccattcatatcaagtaatgttcaagtatgataaaattattttggttgctttaaagcactgtttcccaaatctacctgatcataataatttaccaggaagcagaggagagctacttgtttaaaaatccacattcttggacccaatcctcagatgcacggattcagtcttcaggggaaactctgttttaaggggtatgttgtaatctaaagtaattggttcaggaggtgtcaataggttgaacttgtgagaaggcactgaatctgccatccacatcacatatagcagctattatgaaatcagctttcataggcctatttttaaaaggaatctgaaatttaattctattttgataaaactaagactgaaaataaccacttgtaaacattcctatgattgttactaaaatgtattttcatgtttaaaatgtttttggatatttttgggttaataactactacattgaattgcatgttaaggtgcagaaataatacattaaaagattttcactttaaattaattagtaatattgagcgctcaccctgtgcgtggccttgtgctaaccattagcactgcatcatttcaattcttttataagggcattcaatactacaaaatcaacatgatttcataaggtgcaaataaaagttggtgacagatttaatataattttgatcacaatttacaaatgatctttgcaaatagtggtcagacggcattagtttttcccttagttaagctaaattaaagggactccatcctgttatgattatattattattattattattattatttttgaggtggagtttcactcttgttgcccaagctggagtgcaatggcgcgatctcggctcaccacaacatccgcctcctgggttcaagcgattctcctgcctcagcctcctgagtagctgggaatacaggcatgcgccactacacctggctaatttttgtatttttagttgagatggggtttttccacgttggtcaggctggtctcgaactcctgacctcaggtgatccgtccacctcagcctcccaaagagctgggattacaggtgtgagctaccgcgcctggccatgatgatattattaaacaccattattcacatttcaaataataacaatactttttgtttttcaaaaataaaatgcaatgttatataaagctataaactaagttctttatgatatttgagcaacaactcaggaatataacatataagggagatgttaatttaaaaatttccactacacttattatctattaaccaaagcttaaaattttgtattcttctgttagataagaccttttacccatttaatttgtctttaaggacagtcatttggcttctgaatgtttgaaacgattttaaaaaataagtagtgctatggttgtttctataattctaacctttgatagtaatcagaatgtattacatttcatttctgaatagcttttgaatttatgaaaaattattaacaatgaaaaattggtaattttattaagttatatgtgtttaaatattatattagcttatttctcttgcattaatagtactgctgtttttgttttgcttctttatatttatgtctagcttttatatgtaatttatctagtgtttataaaatgtgatttgtaataaatgttgttaaaatg

SEQ ID NO: 16843 - DNA, 2161 bp, Homo sapiens
ttagaaacttccaaggatgacccaacctttgcctttgccccatatattggggaaaacccatacaccaaaaggattttagcatatgttaagaggaattgcagtgaaaaggataacatttttccatagtaaattgtcttgcagtttttgaaaatgtttcaagtctagtttttacaagcacattacagtaattgcaggttgtccagaggttggtttgtcagaggctattgggaacagctgggcccagggtatttgctcagtaaatattttggggcagctttccggttatataacacattgacaagtatatgtattaagagtccttgcattgttaactgatttgcaagagaccatgattatcagacactaaaactacttatcttttgaagctacagcatgtgactccccagagctcctgtctgtaggaagtttctaattccctggtatctataaacccttttcaggggagagaccggagaccccatcttagatactgtcaactcactactgtcttcctttgttctgcacaaggttgagtttctttcacagtatcttaacttactgagtcaatactcctcatgcttatcagtgtccagtgcctgttcctaaacttgcttgttggggacacactcataactatttcacctgactgacaagcataaaaggctaacttgtggatagtgtttacaaaagtacaaaagtactacttccaaggaaaatgctctgattctctgtttaggcatttgtgaaggattccagagcctttcccaaagtgagaccatttctggggtatttgtaccaggtcagggtttttgtgttgttttcaaataagtttgactaaaataagtttggctgacagtttttgtatacctgctttaatgtttataaaatttttattgaggtataattaaaatatagtaaaatgcacagaggttaagtattcttacctgctttaattttgaaacagatttttattgtcaaacagaatttgaaagcatgtgtttaacacatggatataatttagctttgtgtcacctttgaatctgaggcagtttcccaaacaaaaaggctggagccatttttcagaagttgcttataccctgttcccaaactatcagccttgattaatttctagtaggaagagaataattacatttgcgggggggggggtggataaaaaacatgtctgcttctcatttaaataagagagaaatgatgccgttttttaaatgtgaagcagactataattctcagctctcttttcttcttagccttaaattaatattctctttcttctagttttggaaagtgtagtgggaatattcagacaaaagaggccattttccatttttaaagcttcttactggtgaaacagcccagttgtagtaggtgccagtcagtcaaggcaggggccctctctccgtcaatatggaaaactcagcagttttcctctcccccagttgtgttcttgtaacgttgttaatgggttcctttgctttttgctttctccttttctgaaaatgtatgtgttttgcctctcttttggctacatcttcaaaatatttcttttgtgcctatgtacatgtgtaaacatgccatagcatgtgtggtaggtgtcctgtattttgtttgggaaaaaaactatcaaaatgaggaagagaatttcccctatttatgcactaggtttctgtgctttttctttgagttctctggagtagatattaatttgataccttcatggtaatgaaattatgatggagctgtgttataaattccttatgtcagaggccagtgcggtagcctttgtcccttcatgcctttcaattctgagtgggaggaaaagcaaacatcaaaacagtgcttcagccaaattccatatgtaatgccattgggagagtattgactaaaatatcattcgtcagggaaatatagttgtaatatttttacaggatattcctaggtaaatgaaggagccttcagttgtaaatttcaattaccccaaaatgtatttgctacattttgttgtttgaagtattacctcttaaccttctttgttaatttttttcattttgtcttatatagtccagttttccaagataagctcagtcctttttcaaatgtcccctttttaccaatactttttcattaaattatgaaaactgct

SEQ ID NO: 16844 - DNA, 366 bp, Homo sapiens
ggacaggtcttctttcctgccagagggagctctgaagacaactagagaattctgggcctgaaatttcaatctagttagaaagaaaaatgaggcaatgattttattaacagcgttaagttttaatttacaacttttaaaaggcagagcatttttaacaaggggtgacaggtggttttgataacacacttataaggctttctgtaaaaggtactatagaagggcgaagaatcgttcaactgtcaatcagcctcttgattctttgtaaattgccagggtgggtgggtacatatctcttcttgattctgcatttcatacttaactatattaaagcttcaaggaacaataaatagtaacctggtaatgacc

SEQ ID NO: 16845 - DNA, 213 bp, Homo sapiens
gcagcttcaagagcaacttctccacatgttgggtgtccatcctggggcagggaaggacagagtgttggatggctgggacggggccttgctcttgtcggccagcccactccccagccagagagggcttgaccaaatcaaattgaggtggtgacttttgttggaaaattgggctgggatcacgtcctgttttgtaataaaagctgaaaagtctgc

SEQ ID NO: 16846 - DNA, 198 bp, Homo sapiens
ccccgtctgctcctctaggctggccccttgtccacccctctccacaccccttccagcccagggttcccatttggcttctggcagtggcccaactagccaagtctggtgttccctcatcatccccctacctgaacccctcttgccactgccttctaccttgtttgaaacctgaatcctaataaagaattaataactccc

SEQ ID NO: 16847 - DNA, 1225 bp, Homo sapiens
gccacagaccgaggccccagcaggcagcggctggagggatgccacacccctcacagggcagcccccaactacatcttccctgcttactctctgcctacctgcctgagccatgttcacctgcccacttgtcccctgctgcctgcccaaacaccccaccattggcctgtcaacccacccattggcctgtctgctgggtgctaacaaagctctcatcactccttcacttggtctgtctgtctctgtcttggtagttgccggtggacagcatggccgtgccagcctcccacactgaggccaggtctaccccccatcataccagcccccaggaccactaccccacggccagccaggggtccagagctagcccaggctggggatctcgactcagacaagatggtgacaatgccttgagtctgaggcatcctctgcctgctttcctgcctgccccacctgcctcatattgtgtgggcctttttttgtttgtttcattcattgtttttttttttttaattattttaaatgagatttttgttttttttaaatgcaatatctctgtatacagactggctgggccccaccccctgcgtgtggccctcccacagtattttgtgcaatgaagccctgctcccagcctttcagagacagggacacagcccctatttggaaccctgatcatcaccagaccctgggattggctatgggaaagcatgccacagccactcgccttcctacccccgcccgccatccccagttgcagggggatctggggactaccagagactctgggaaatggacaaggtggggggccccactctttctctcctgcagtcccgtagctggggcctccttccttctcagggtctccccagcccagtccccttgctcccatcccactcggtgctgttgggtaggggccctgccaggaactgaccagctcagcgaggagccataatgtgcatatgtgcacaagcagggttgggggaggggggtgtgaggggttgtgcccaggtgttgccccctatctcctggggagggtgaggcagggcagggacagtctccagggtcagtccctggatgggtggttacctccccttcctccaccctaagccctggggccctgaaatggggtgggagggcaggggtgggagccctcctagtgggtttggggggttgggttcctgaatgcaccataatcgctgtatgaaatattaaaaagtctaaagtg

SEQ ID NO: 16848 - DNA, 397 bp, Homo sapiens
gagccctgggtcctgccacagaaaaaaaaaaaaaaaagccctctctgcaatctcgcttctcgtgtccgccccgcttctcttattcgtgttaggtgcccccgccaggcattgcaggcttagtcgtggctactgttctcctgtgccgctgcatcgctctctcccgggaaagaacaggtcgtgtctcctcctagcagtgcgcgccccgcctgtgtttgcccttccagcagtgaccctcccttctagtctttatttatggtcgtgcccttccctctcctcagcccagagtgttctgcgtgggtggtgatgggggttcacctgaacacagagtgtattttcttattgaggccctgtaccttctgctgtgtgtgtgtatatataaagcaccagtctgctcccc

SEQ ID NO: 16849 - DNA, 105 bp, Homo sapiens
agacttccctcaccattggatcaagctccttgggggcatatgatcaccagggcacacagtgtgcctgtgaaaatttggcacctacatttgtatcaaagtatgtcc

SEQ ID NO: 16850 - DNA, 464 bp, Homo sapiens
gccccgcccaagccaccagggagccaatctcagccctccacgccaaggagccttgcccaccagccaatcaatgttcgtctctgccctgatgctgcctcaggatcccccattccccaccctgggagatgagggggtccccatgtgcttttccagttcttctggaattgggggacccccgccaaagactgagccccctgtctcctccatcatttggtttcctcttggctttggggatacttctaaattttgggagctcctccatctccaatggctgggatttgtggcagggattccactcagaacctctctggaatttgtgcctgatgtgccttccactggattttggggttcccagcaccccatgtggattttggggggtcccttttgtgtctcccccgccattcaaggactcctctctttcttcaccaagaagcacagaattctgctgggcctttgcttgttta

SEQ ID NO: 16851 - DNA, 99 bp, Homo sapiens
atcctgcccggagtggaagctgaagcctgcacagtgtccaccctgttcccactcccatctttcttccggacaatgaaataaagagttaccacccagcag

SEQ ID NO: 16852 - DNA, 5579 bp, Homo sapiens
aagtaatcctgtttcttgaaaatgagagccttataaggctgacaaaagtcaggtctaactatatattataaaattcatccaagacagatcctatatgaatacattgtataaggaaaagcatcaggctatctcacttgagatggaaaaaaattattcagaagaaactctcttaaaaatgcattgaaggagagagaatttgcacagcctcatgaaatatagtaaaagtcatactgggaaaaatgttgtcagtttggtgtgttaggaaaagccttcctatagaaagtattataagttaaattgttaccaaattctttataggaaggagagtgcaaaattatgtaaatgatggtcaggtttactgtgttatattaagcaatttaaagtgataacaaaatgaaaggtagtgcagcaaaataatataactggtgagtagacctactttcagttccatagggtgtttgtggcagaacacagtgcagaacaggaggaatattacattttttttcaaatttagaataattatgtccatcaaatgtttcttactgaatatgtctatcaaatatgtttcttattgaatatttctatcaagtgaatccacaatttaaaagtcactttggttttatatatacacacatctgcagatataattttataagaacacacaaatataatcctgtcattcgtactggtttccatgacatagtatcttgttttctttcattgtggtacaatgcaaagtagccacagattcctcccatcccaagtagcgtctctttgtctactacttgactttgaacttggccacgtgactttctttggccaatggaaattagcaaagagaatcaataagaagcttgagaagtgtgcaaagcctgccttgaagcttaccctctcttgctgctctttgcaaacctgaagaatctcaaattgccctactcgggggtgaggagccaccacatggagcagtggtgagccagccttgctgaggccccttagaccaagtagcctgccaattgtcagaattgggagtgaggttttccaagacctctagccccagctgagccagcctagcccagaagagccataccagttattccagctgatttacagaattgtgagataaataaaatgatgatagttttaagcaacatgagttttggggttagtttgttgtacagaaaatgctaagtaatatttgaaagtatatgtttgggggagggggcatagtggaccaaaacgtgacaagtggcattggctttgggtctgagtggcacgtagaaactggaaaaacagtgaggaaaactgtttttcctcaaataacaaaggttggatagttggcaacccatgttatttagtagggaaagatacagaaaaacagtcatcaccatactctgtgggaagatagagaatggaccaaacgaactggtggatctggctaaggagatttgcagcagaatatgggaagtatcagtttgcttcttttagctgcatatgatacgatacagaaagagagaaatgaactaaagaaataactgtttctttggcaagcagaattcagaagaaatatggaaaagccaaggattgctgggttgaaaaataatgctttcacatcactagtctctccagctatctaactattcgcaaggtaaaaaatggcctcagggtaaagatcaaatcatggttgtgtctgtaagactctttattacagtgtgtgaaatagttcagttggtgcttaggagaccatctcagctaaacttaagggcttctaaaaatcttcatgacgttgtcccatagaagcctgacatactactcaaagtggagagagacctatcttaaaaagaattgctgatgtggcatttggggaaaggagtagatccaaaccagattcataggaaactcacaaagtttttaatagagttttactagtaaaactacctccaggttggacttccagggactgaaacagttcaaaatgaaaagtggcctctggattcccctccctaacttctatgaataggatacaagctgagaaagttactcagatgcaaacacggtccatttcttatggaaaatgaagggcatctcagagggaagacccaagaacaatatattaaaatgagctggggagccgttcccagggagaactgtgccctaatcaagaaacgtatctgcccctggagccaagggaaccgacaacatttgctctgtgggatttcagaatcgttatggaacagtgactgatatgtgcctcatggtcctcctctttttgaatgggagtgtctattacagttatcctgtacctatcccaccattgtatatattgggtgtatgttggggggcatgtaacttgtcatttagctcacaggtatctggatcaagaaactgaaaaactgtacccaaggaacctcagccacacctgaacctgatacagaagacttgagattctggattggagcttgatgccacaattttggatgagaaatttggaggtcctggaataggggtgaacacattttgcatggggtggtaatgtgaatactttgtgaccagaagacacactgtgttaggtagaaaaatgctacagatgtcttcatccctgtatatgtgtccttcttcagtctttatttctctttgtgtttcagttaggataatttctattgatctgtcttcaaattcactgatgttttttctctcaccctggctttgtcaagtctactgctgaacccattgaaggcattcttcaactcagttatgttttatttttatttgtaatatttccatttgattcttacaattttcatatatctgctgaaattccccatcttttcatgcatgttcatgttttcccctttaccctttgtcttagtcagtttgagctgctataataaagcaccatagacttggtggcttataaacaacagaaatttattcctcacagttctggagcctggaagtctgagatcagaatctagcaaggttaggtcttggtgacggccctcttcaaggttgcaaactgctcacttcttgcattttcccatgtctacagctagagaactctttgggatcccttttataagggcaccaatcccattcatgagttctccacccacattacctaactaccacccaaaggctccacctcctaataccatcacattgaggattaggattttaacatatgaattttgggggggatgcaatcattcagcccataataccctctaacatattaatcatagttatttttaactccctgtctgatagttccaactactaggtcaactgagtctaggtctgttgttgtcttctcttgctcttttgcatctaataatttttggctgaatgtcacagatgttgtatgtaggacagtagaaactgaggtaaatagtaattattcctggaaacagccatggttgcccttttgataggccattagcatggggagattgaatccatctaatcaggagttgggctgagtttgtgtttctttgttgccagtgttacctttgctgtaccatagacttaaaattcctctattgttatcttatgcttgaggtaggcactggtttgcccagagaatttttatttttcccagaccacacttgcctttaggcctgtaggcctttcctgtgtgcctgcatctcagggagggtctctctccatgttgttgcctctatgttagtagtagacaactgttattacttggttcttgctgacctggtgagttggggggcaggggttgtcttgggccagcctcagtttttgtcaggccatgaatccctgggtcttgagggtgggattttttagtgatcctgccctcttccactggtagaaggcctttaatgatctgggcccaggatgatttcctgcccttttatcatgggtggaatttttttttccatttccctcactctagtcacagtgaatctttaactgtgtcctgagggcaacagggtttgctgcacttcttttagtggcttaaggattttgttctgtaggggagtagggtttcattggagctttgtgccatttctatgttaacagcagcccccttgcaggcctaccccatggaggtaggctttctccagtcttcttccttgtccccgtgtttcttgagagcactcagtggatgactatggagaagagcctgcaagcagagaccaactacccttaggtctacagctctcatgagtctcccgcactcagcctttagcaattcattaaaaattcttgttgaattcttactgcttgtatagtggcctcatcttccttcctgctgtaccacagatggcccaggagaggcacttgtcttttattatatttcaagctagttggttgctctgtaatcttagctctctgatgggttcgagaaaacttatgtttttgcagattacccagctttgttcttgttataaagatgggagcagtgttctttccagatgtctacatgctaggcagaaactagaagtctggacagtctccatggtctcctactatcagaatatgtgcccttttcagtgtgactttgccacttcacccatcaagaggtagaatctatttcttcaacccctgcaactgagcttggctattttgttggccaatgggacattaacaagtatgatacaagcagaggcttgagaagtgcctgcacaatgaggcttgcccacttttgcagctctttggaatcctgaacccatgtgtggaaaagcctgaactgtgctgttggaaaatgagagcgatcacatggagcagtaatggagcaaagaccagccatcccagttgagataccctacaccaaccagattttcaactgctggacatatgaatgaagctatcctaggcatgcagtcttggtcaaggcaactttggctggcagtctctgagatgaccctgaatgatccccacctcctggtattctcactcttatataatcccctcctcttgagtttggactggaattagtgacttggttctagtgaatagaatgaggcagaggtaatgggatgtcatgttcaagattggttacaaaaagactgtggcttccattttgggtgcttgcttactctctcagatggctcatcataggggaaacctgctgctacatcatgagatagccctgtggaaaggtccacatgagtgaactttgaagcatatcctcccccagtttagcctttagatgaggaccacagccaaatagcttgactgtaagccagatagcttgactcatgagggaccttcagccagaggcatcttttgagccatacgaattcctgacccatagaaactgcaagacaataaatgttgttttaagttgctaaattttagggtaatttgttacacagtaataggttaataatacactggcccagattaggaaggttctgccatccatcccagccatcccaaacaactaccagaataatggattaaaacgttaactgttttaagtcactaagttttgggcagcatgataacaacccagcaaaaagctaactgatacattgattatttattgcatttcttcctccactattcttctctaacagatgaccaatactaataaactactgtgaacactt

SEQ ID NO: 16853 - DNA, 84 bp, Homo sapiens
ctcagattcgaagagacagattttatcttcctttcatttctttctcttgtgcatttaataaaggatggtatctataaacaatgc

SEQ ID NO: 16854 - DNA, 588 bp, Homo sapiens
cctcagggatacgacacatgcccatgatgagaagcagaacgtggtgacctttcacgaacgtgggcatggctgcggacccctcgtcatcaggtgtatagcaagtgaaagcaagtgttcacaacagtgaaaagttgagcgtcatttttcttagtgtgccaagagttcgatgttggcgtttccgttgtattttcttgcagtgtgccattctgttagacattagcattttcgttgatgagcaagacatgcttaatgcatatttcggcttgtgtatccatgcacctacctcagaaaacaagtattgtcaggtattctctccatagaacagcactaccctcctctctccccagatgtgactactgaggggaggtctgagtgtttaatttccgattttttcctctgcatttacacacacaccacacacgcacacacacacaccaagtaccagtataagcatctcccatctgcttttctccactgccatgtgtcctggtcaagcccccctcactctgtttcctgttcagcatgtactcccctcatccgattcccctctatcagtcactgacagttaataaacctttgcaaacgttc

SEQ ID NO: 16855 - DNA, 84 bp, Homo sapiens; identical to SEQ ID NO: 16853

SEQ ID NO: 16856 - DNA, 952 bp, Homo sapiens
atacacaaggaataatttctgatccaggatcgtccttccaaatggctgtatttataaaggtttttggagctgcaccgaagcatcttattttatagtatatcaaccttttgtttttaaattgacctgccaaggtagctgaagaccttttagacagttccatctttttttttaaattttttctgcctatttaaagacaaattatgggacgtttgtagaacctgagtatttttctttttaccagttttttagtttgagctcttaggtttattggagctagcaataattggttctggcaagtttggccagactgacttcaaaaaattaatgtgtatccagggacattttaaaaacctgtacacagtgtttattgtggttaggaagcaatttcccaatgtacctataagaaatgtgcatcaagccagcctgaccaacatggtgaaaccccatctgtactaaacataaaaaaattagcctggcatggtggtgtacgcctgtaatcccagtgacttgggaggctgaggcaggagaatcgcttgaacccgggaggcggaggttgcagtgagctaagatcgcgccactgtactccagcctgggcaacagcgagactccatctcaaaaaaaaaggaaatgtgtatcaagaacatgattatccagcggtattttctaattcagatcatcaaactgattatatagaagagttggctttaaaatgtttgcaaatgtctttttttttttaatactggaagaaaaaatattctgttgtgtctcatacagtgcttaggatgtctttcacagagcttattaaaaagatgaaacctgagaacaaactgctttattcttactcagcccattttgcaaattaaaagtgggggcagaggtgggcggatcacctgaggtcaggagttcgagaccagcctggccaacagggcaaaaccccatctctactaaaaat

SEQ ID NO: 16857 - DNA, 591 bp, Homo sapiens
cctgggggatacgacacatgcccttgatgagaagcagaacgtggtgacctttcacgaacatgggcatggctgcggctccctcgtcatcaggtgcatagcaagtgaaagcaagtgttcacaacggtgaaacttgagcgtcatttttcttagtgtgccaagagttcgatgttagtgtttccattgtattttcttacagtgtgccattctgttagatactatccttataattgatgagcaagacatactgaatgcatatttcggtttgtgtatccatgcacctacgtcagaaaacaagtattgtcaggtattctctccatagaacagcactatcctcatctctccccagatgtgactactgagggcagttctgagtgtttaatttcagactttttcctctgcatttacacacacacacacacacacacgcacacacacacaccaagtaccagtataagcatctcccatctgcttttcccattgccatgcgtcctggtcaagcccccctcactctgtttcctgttcagcatgtactcccctcatccgattcccctgtatcagtcactgacagttaataaacctttgcaaacgttc

SEQ ID NO: 16858 - DNA, 588 bp, Homo sapiens
cctcggggatatgacacatgcccatgatgagaagcagaacgtggtgacctttcacgaacatgggcatggctgcggacccctcgtcatcaggtgcatagcaagtgaaagcaagtgttcacaacagtgaaaagttgagcgtcatttttcttagtgtgccaagagttcgatgttggcgtttccgctgtattttcttgcagtgtgccattctgttagacattagcgttttcgttgatgagcaagacatgcttaatgcatatttcggcttgtgtatccatgcacctacctcagaaaacaagtattgtcaggtattctctccatagaacagcactaccctcctctctccccagatgtgactactgaggggaggtctgagtgtttaatttccgattttttcctctgcatttacacacacaccacacacgcacacacacacaccaagtaccagtataagcatctcccatctgcttttctccattgccatgcgacctggtcaagcccccctcactctgtttcctgttcagcatgtactcccctcatccgattccgttgtatcagtcactgacagttaataaacctttgcaaacgttc

SEQ ID NO: 16859 - DNA, 629 bp, Homo sapiens
ctggcaaactgatacaactcagaaactgctcaatgtcaggaaaaccggaacttgttgatgaacttgttttcaaaatatcatctcatcaacgaggcctggacaaacaagccctgaggagggatctgcaacaaccctgaagacaacaaggaaagaaaccatgaaagtctgtctgtactgcagtgggaattcttgagtgaggtcttacctcttctttaaacctcttcaggagtgtcctgattatgtccagaattttccctaaaggcagggattcttaacctggatagaagccaggggtaaccatgaacttgatggaagaaaatgttacatctttattttcagcaatgaaactgaaatttagccttactcccaagttataaatgctggcaacaaatcacagtagtaaaagcagtacctgggattttcccaccaatacaaaccagttacagcaactgtaatgtaacataaaaagggcatcttgaagtattgttcatatttgtcacctcttggaatgatagcagatcctgtaagttgatgtattaattaaaaagcccatatattactgcatctcaattttgtttcaatttaatatatagtaataattgtaattcaatgtaattggcttccattgt

SEQ ID NO: 16860 - DNA, 338 bp, Homo sapiens
ggcacatctgtggaccctcataaccctcttaagacccctctcagggtgccactgatgggggatgagggaaggccctctctctactccttgaccccctccatccttgacccccaacacctcaacacacacacacacacacacacacaaaatcacaccattttcatgcctgtcaatccccaccccaccacaaggcaggaagggggtggtgcctgctggggcctagagggggatgcttggggaaacagagaaggggagatccagggcctccccgccttccttcttcctttttatatacaatttgttattgtcaaataaaagtaggaaatattcaataggct

SEQ ID NO: 16861 - DNA, 257 bp, Homo sapiens
ggagtggtggaccaggctcgaacactggccgaggaggagctctctgcctgccagaagagtctagtcctgctcccacagtttggagggacaaagctaattgatctgtcacactcaggctcatgggcaggcacaagaaggggaataaaggggctgtgtgaaggcactgctgggagccattagaacacagatacaagagaagccaggaggtctatgatggtgacgatttttaaaatcaggaaataaaagatcttgactct

SEQ ID NO: 16862 - DNA, 1634 bp, Homo sapiens
tcaggctttctcaagccctccatcggccccaccagatctccattctttgccatgagggccaacacatgagaccccacctccctccctgcctgccagccctagacttgttggagcatagagcccttcctccccaggcctaagtatgtggagctctgctttggcactgccccgcagaggccacgcctatttattctgtttctgttgttttgtttttaacaactatactttgcacacatgaaggtcactgtggtttgtgtgtttctctgcctcctccctgggttttgctgtagatggagtcctcaggggccctttacctgatggaggggaaatacttcacttggtggagagaggctccagcttcccccttgtgatggggagagtggatgctgacaatcagttcccaaaggtgagcccaggtggagcactgcttgaggaaggcctgagtctgtttttttggtacatccatcggcctgtaagggtctgtattatggctgtgaatatatgttttcaggacagccccctggatgagagataagagagttcctggctcaaaaaaggacaagattctttactgagattgggaagtatgggctacttagaaacgttggagcagccacccctggcattccacatgtcaccatttctaggatcttggcctctctgtgaggtttatgcaccaatgctggcagccctgggcaggggcctcggcctcctttttgttttccacttcagacaggtaccgtgcagatgttaacaaggtttgagcgaggtgcatctcacacaagtgtgaaagcccaatcatcacattgttgaattacaaaaggatctagggctcctattcttgtcacttgctttggagccagtttgaaagactggcctagcccatgcctagcggccctaaactgggattccagctcacagcacctgtcttaaccatttcagcagtagaaaccacttatttaccttctccatctcactaatatggacaaacaacaagcactgataaaacgcaggccctaatagaattcacttcgttatttggaggataatgatcaaaaaaaggtcctttttcccactgacatgctcagagggtgggattctctcacaggccaggtgctgtcatccacaaaggatgggtgaaataactggggtcctcaggtcacggtctagccacaccagcttctcccaagtactaaccaggcttgaccctgcttagcttcagaggtcagacaagatctggcatgttcaggatggtatggctgtagaccaggctgggttctggccagagctgttgcactaggcaatgctgccagagatgaggaggcatcagggcagtcatcccttctgctgtttgccccaagaatgccatacaaacctggggatgacccttaaaagtctcccgtcacccccagtattggggggaagctgactattcctcagatgatagcccagtcacttgaagaacaggacaagactattctgtgtctagggggctcaagcactgtgtgtgggtctaacgaatgcattttgtggaaatgggctcagactccccaaagggccatccaacctatgggagtgtctggccttctgaggtcctgaaatgtctcttttgtcagtaaacagctaataccctc

SEQ ID NO: 16863 - DNA, 154 bp, Homo sapiens
ggtcctgtcggccctgctgctgtcctccatcccacccctcttactccagcctcgtgttgtaaataaagtttcggtggtcatgctgagggccggctcccagctctgccggggacggacagggcagagggcagcgggcagctccaggaacacggtg

SEQ ID NO: 16864 - DNA, 262 bp, Homo sapiens
gtggctgagttacttgctgccctgtgctcctccccgcaggacatggctccccctccacctgctctgtgcccaccctccactctcctcttccaggcccccaaccccccatttcttccccaccaacccctccaatgctgttatccctgcctggtcctcacactcacccaacaatcccaaggccctttttatacaaaaattctcagttctcttcactcaaggatttttaaagaaaaataaaagaattgtctttctgtctctctat

SEQ ID NO: 16865 - DNA, 1443 bp, Homo sapiens
cccttagaagtctgaggccagactgactgagggggcctgaagctacatgcacctcccccactgctgccctcctgtcgagaatgactgccagggcctcgcctgcctccacctgcccccacctgctcctacctgctctacgttcagggctgtggccgtggtgaggaccgactccaggagtcccctttccctgtcccagccccatctgtgggttgcacttacaaacccccacccaccttcagaaatagtttttcaacatcaagactctctgtcgttgggattcatggcctattaaggaggtccaaggggtgagtcccaacccagccccagaatatatttgtttttgcacctgcttctgcctggagattgaggggtctgctgcaggcctcctccctgctgccccaaaggtatggggaagcaaccccagagcaggcagacatcagaggccagagtgcctagcccgacatgaagctggttccccaaccacagaaactttgtactagtgaaagaaagggggtccctgggctacgggctgaggctggtttctgctcgtgcttacagtgctgggtagtgttggccctaagagctgtagggtctcttcttcagggctgcatatctgagaagtggatgcccacatgccactggaagggaagtgggtgtccatgggccactgagcagtgagaggaaggcagtgcagagctggccagccctggaggtaggctgggaccaagctctgccttcacagtgcagtgaaggtacctagggctcttgggagctctgcggttgctaggggccctgacctggggtgtcatgaccgctgacaccactcagagctggaaccaagatctagatagtccgtagatagcacttaggacaagaatgtgcattgatggggtggtgatgaggtgccaggcactgggtagagcacctggtccacgtggattgtctcagggaagccttgaaaaccacggaggtggatgccaggaaagggcccatgtggcagaaggcaaagtacaggccaagaattgggggtgggggagatggcttccccactatgggatgacgaggcgagagggaagcccttgctgcctgccattcccagaccccagccctttgtgctcaccctggttccactggtctcaaaagtcacctgcctacaaatgtacaaaaggcgaaggttctgatggctgccttgctccttgctcccccaccccctgtgaggacttctctaggaagtccttcctgactacctgtgcccagagtgcccctacatgagactgtatgccctgctatcagatgccagatctatgtgtctgtctgtgtgtccatcccgccgaccccccagactaacctccaggcatggactgaatctggttctcctcttgtacacccctcaaccctatgcagcctggagtgggcatcaataaaatgaactgtcgactgaac

SEQ ID NO: 16866 - DNA, 144 bp, Homo sapiens
gggcacagagcatggcctccagaggaggggtggtgtccttctcctcttgtagccagaattctggacaacccaagtctctgggccccaggcaccccctggcttgaaccttcaaagcttttgtaaaataaaaccaccaaagtcctg

SEQ ID NO: 16867 - DNA, 358 bp, Homo sapiens
gccccagaatacggtccctcttcaccttctgaggcccacgatagaccagctgtagctcattccagcctgtaccttggatgaggggtagcctcccactgcatcccatcctgaatatcctttgcaactccccaagagtgcttatttaagtgttaatacttttaagagaactgcgacgattaattgtggatctccccctgcccattgcctgcttgaggggcaccactactccagcccagaaggaaaggggggcagctcagtggccccaagagggagctgatatcatgaggataacattggcgggaggggagttaactggcaggcatggcaaggttgcatatgtaataaagtacaagctgtt

SEQ ID NO: 16868 - DNA, 313 bp, Homo sapiens
aggtcttggccaagaaatgtagacctttccccaggccagggtgattgttcatttgacatgagacccctgaggcaactagctttgagggacacatcaggtatactagggaaagatggacatctctcttgttttcacttggtgaggggctttttggtaacatgggagtgcctaatgttgcttttgttatgtcaagttgaaagattttgtgcaaaattaaataaatggtgttttgggtttcaaagctgcctccatgccgagtgttgtgtgggtgggagtgagactgggtagaatgttacttgagttgtgagaattc

SEQ ID NO: 16869 - DNA, 58 bp, Homo sapiens
agcttcggcctccctggccctgggttaaaataaaagctttctggtgatcctgcccacc

SEQ ID NO: 16870 - DNA, 1861 bp, Homo sapiens
tgggtaggggtctcgtaaggcagatggcgaagatatccaggccagggagtggctagtcatgatagctaatgaattggaccatgaggaaactagctgctgtgatggcacagggtcactctactgcacatgacctgcattagtccatggggtcctggtggaggggatcttgggcactggtagcagcaattctttatcaagttataggctgaagatgagccttgaagccagggtgccgggaggaagggacatctcatgccccttgctgttttcttccttttttctccatgccccagagcctgaaagtgctgtcctgtgcctgcctccacctctttaacgagcctcttttcctttctttttctgtgtcttgtctgtcttttcttcttcttgtcttccccgccctgtcctccggattcctgctaccccttctaaagatactacgcggacttcctgtatcccccggagctgagcgctcgtttaagtgacctgacgctagagggggagcagtcctccagttctgacacccagaccccggggacactggtctgaccccttctgatatgtcccttgttggcctgggcacgattccaatctggggagcacacagctgacctcgctgggccctggggtgtggttgctctcagtcctgagcagagtgcgccaacctaatcttccaaggcccctggctccccgtaggcccaggaaggtgtctgacaccctgcttcttctctcacactgtgctggggactgggggccctcagctagcttaaaagaggggggatgatgtcatggggaccccaagccccttcctccatttatgtttacagttgtgacttaggtattcactgtcttcctccaacactaggcgttttacaaaagggaaactgtgatctcatctggttgggttcattcctgttcccatgcccaaccaggttccattcaggaaccccctccataaaatggaccatatcgggtctcagggccatttagggcagccaggagactccggtgtgaacagaaatccctgccacgcatcgccagggcagttggggcagtgggctctctgcccacacttggaaggactgcagtctgggtgggatgcctgaaagagcccaaccccctctgtgcccatggcctctgccctgaccacccccagtcaggaggccccacaggaggggcacccggtagatgccagtgaaatcctcaggggaggtctgcctgaaagagcccaaccccctctgtgcccatggcctctgccctgaccacccccagtcaggaggccccacaggaggggcacccggtagatgccagtgaaatcctcaggtgaggtctgcctacgggccacgggccactcaccactcacaccttccttggctttccttccacccttttttttttctcgagacggagtcttgctctgtcaccaggctggagtgcagcggcgcaatctcagctcactgcaacctctgcctcctgggttctcctgcctcaccctcccgagtagctgggattacaggcacacgccaccatgcccggctaatttttgtattcttagtagagacaaggtttcaccatattggccaggctggtcttgaactcttgacctcgtgatctgcccgccttggcctcccaaagtgctgggattacagccgtgagccactgcacccagccccaatccaccactttttaagcaaacccacacaagttgtgttttctatgatacctgtctgtgattttcggagctgggggttcccctacccccttttcctggcgttaagcttttctttttataccagtggatctggacccaagacattacccacactggaaggggatttgtataataaatgtgtaaactgaaccc

SEQ ID NO: 16871 - DNA, 1098 bp, Homo sapiens
gcctacctctgacagcgcggggctcactagttaccgcccaacctggatccggcgcgtgtggccgctgggcacttggcacctccccaagagcttccacttggtttggtccccccacccgctgctcagtggctctgaccacactcccctcgcagcgtcagtggtacgacccttccagccggctagcctgcgcttctggttctgggagggggaggtaataaaatggttcgatccggtcttgacttgccaggcgctcgaggcggggtggggctgcccgggccactctgtaaaggagcaggtgggtcgatcctgcttgagtaatcgctgacgagcttcgtgctgctgctttcctgcttgcacatgttatctttgcttctgccggtcctcagtctggcgtgctttctttttctcttcgccgtctcctgctcctctccttattcattaatttcacctttttggaggtgtacagggtctcacacataaattattgtgcatggcatggagaatgcagaggtgagcctgtcgtggcaggactgcaccagtgtatccacagtcctgtctcggaatcatacagaccctcagctgacgtcgggatagcaaggctagaagcctagaagcagggcagcttccttcgccagaggcctgcggtctcccacttccggcctagtctgccagcttttgctggcacgtaggctaccactctccgggcaccggctggggccctggagccccctttggggcggagtggggaaggtgtgagtcagcgcccctggacgggccgggctaaaaaaggctgttagaacctttgggccgtgcccccattttccgtacatggtgaagaactgcagccgggcttgtgtgcacacgccacacactgggcgttcccggcacgggagaggcccagagtttccttcaccctgggaacagagccctacagccagggcttatatggccagcgggactccaaccggggtagccgcgaggaaggcgctggcagaggacagaaatgtccagtcacctccgctgtcaccacatcctgagcactcggccccatccccccacaggagggaagctgtggtctgacggaatgggcaactttcg

SEQ ID NO: 16872 - DNA, 392 bp, Homo sapiens
gcgaacttccctcatttctctctgcaatctgcaaataactcctccattgaaataactcctccccaccccaacaacaacattcccagcagaccaactcccaccccctctttgaggtaaaagtgcctttattgggagacttttgtcttccagcctgccaatcaaccctcctgggtgtggccaccatatgtgtgtgcctaggtcctccttctgcacgatccaataggagacaccagttctgactgaaccatgcccccacctaagtcacaaaatgagggaagtggggagttagatttcagagtccaggccctaggttgggacccactccaaataatctcctcggtgtgggtggtggttctatagagggataaatgaataataaacattgttaaaat

SEQ ID NO: 16873 - DNA, 675 bp, Homo sapiens
ggagccgccggcagaggtctctccccagcctcaggcagggatttggggtgctggaggcagtggccaagcacatgccctagctacttcctccgctgtccagttcctcctgctgcggccttggacccagacccctgcccactgaccgcaacccttatatggggtgatagtccagcatgtggggagctcggctgcagtttattggggacggtactgtgggttgggggccttggatcccaaataaatgagtagttcctctgcagtctaagctgaggcatggatcagggctcagggaatgggagtgaggtgagtggcaggggagacacggggtatttttggcaaggcagtgtgtgtggctgtgtgtgtctgcacgggactcaagagacccactggggggctgtgcgtgtgcatatgcgtgagatacacaggtgaattctaacaggccgtgtgtgtgagcgagcacgtgttgggacctcagatcctgagggtactgacgctgcttctgtgtaggcctctgggcacacccctgtgttgacagtgcccctgtgggccctgaggctggctgtgggtgcgtgccttggggtgtgtgggttgtcagggctgtgcttgtgtgtgattgtgtgatgatgcagctttgaggttgtttgagtgtactgaggcaggctctctgtgttttgg

SEQ ID NO: 16874 - DNA, 525 bp, Homo sapiens
gctctgcttgtgggatcagcagaggcttaagatgggatacatggcctgtgcagtgaggggacctgggtcctttgcttctgagaatgctcaactgaaagagaggccttctcatccccaagctctccagtcaacacagggctccctgtggtgacaccagtggagatgagggaacgggtagatggtgtgagtgaggggaacttttagagtggaactgggcatgtcctccgcctaccccccgagcctgtatttatttttgtataattctctggatgagggagagtggtcgtgagctggtcttggggcacaattacccagagatatatttattaacagccaacctgtgcaacctgctggagctttatttttaatttaatttatatagagtacctattattatatgccacaatagagctctatgagaaacagtgtcttgcggtgtagtgttctcctgtttgggcatgagtgtgcagggtggtcactttctgtgggaggatcacagtggggagttgggggtgggacgtggtc

SEQ ID NO: 16875 - DNA, 363 bp, Homo sapiens
gtgaagggcaatcacagtgttaaaagaagacatgctgaaatgttgcaggctgctcctatgttggaaaattcttcattgaagttctcccaataaagctttacagccttctgcaaagaagtcttgtgaatcttttgtcaattttatttctagctatttgatgctgtgaaatgtttcattctttgaaattttgttttctatctccttgagctgtgtgtagaggcataattctcatgtattgattttctatccagcaaccttgttaaatatgcttatgaattttaaaagtttacttctaggttttttcaattttcaacctacagaatcataccatttttgaataagaacaattttgtttctgccttt

SEQ ID NO: 16876 - DNA, 103 bp, Homo sapiens
aagaagacacgttgaaatgatgcaggctgctcctatgttggaaatttgttcattaaaattctcccaataaagctttacagccttctgcaaagaagtcttgcgc

SEQ ID NO: 16877 - DNA, 92 bp, Homo sapiens
aagaagacacgttgaaatgatgcaggctgctcctatgttggaaatttgttcattaaaattctcccaataaagctttacagccttctgcaaag

SEQ ID NO: 16878 - DNA, 105 bp, Homo sapiens
gttaaaaagaagacaagctgaagctacacacatggctgatgtcacattgaaaatgtgactgaaaatttgaaaattctctcaataaagtttgagttttctctgaag

SEQ ID NO: 16879 - DNA, 7016 bp, Homo sapiens
aatcatagagttctggatgtaaagcgggaaggacattacagaccatggatatgttgtattaactgggtacccaaaacacattttccatatttggatggtgaagtcacattagtgtgttgtctctttcctacaagttaaccagttgcactacataatctctggaaattaattttctctttaggagaaattatagttaggcttccatgatgttacattaggaagatatcatgaaagaataaataagattgctatggtttaattatatttgctttttaaaagatttttttaacttaaaaagtagttagccaatatgcaatcactgaaaactatgcaagagaaattccaaccgtcctgacctataacctgtaggaaaccgacgaaaaagtcactcttttgggatctaactgttgttactggaagacgaagtgtaaactaaggggctttgcttttcaaaccagagaaaggaaagccagaaggaaaagagtaatggtattttctagactgtgaagattcagttcaaatgttatccttgttcctgttacaatatttagcattattagtttgttatgtgtgtatgtttatgttaattttaatttctgattataagacaatgctgctttggttaatctcttctaaatgaatttagagagattgacttttatagcttgcttgttgctggtactcttttgaagtgcacaaagataagttatagagctttctccttgtctgcaaaaacggtaattttccaggtggcatttgttagctggtagacaaggactttgccgtgaatttgttagtagcaaggaatgatttcttccagcttccttgaaatgaataattagtaaacttctaagcaaagtcaatgactaggagtttcacatgtttgtgaggtcctaactaattctcttacccagatgccacctccatgaatgatggtgctttaggcttctggaatatgtaaaaacagcaaagggaaccaagtctagactgcatactggtaaaccagggaagactcagaactgcatatgcatcctcatgcattcctttgtaaagaccaccagtactaaaataactggacactcattgtacctcccagcgataagtatgtgtaacaggccagtgtgttgtccccatgatcatgaattaggcttgggatgcttccaaatatattcaaggtgttggaacaggataggcagctgtgactccctcaagagtccttagaattctaaataaaatgcagagccatcctaagacacaggggtatggacaaggcctggtgacaccaaaggtgcttgtatccaattgaaaaggtgcctgtctcaatttcataccacctttattgcagttaaaaaaaaatcacactctggggacacttggtggaattacagagccaccatcatcattccaaccactatttcattttctgtagttttacctgtgtgcaattactccccctccattctgttccacttcttactccttagtaccaaatcctctgtttgggattgagcgctgctcctggttaatcattcctactacaaaaaaaaataactcccagggctagttaaattgtaaaccaaggctcagcagtctcacaacacatggaccagaggtgacacacagccatttcctttgccatgtggcccagttgctgctgccatgcctccatttccacactggatgcctacggcagtgagatttcactgccggggtaagagttcagcctggatgattttatagctctgttcctagcacttctcatcatccttccagcccagaatcagcggtcattctgcatattcccaccaaccctctacccccaaacacttcagtgtacctcattttaagagttgctgatccctgattctaggacgtttttacccatagttcttgtctttccaaaatctgaaattcttttttttgctcagaactgggtagccaagggttattttatttttatctttaaaataatcaaggcagtcgctagagtttctccttgtgaatagatcactctagcattttaatgaaaaagaaaaaaatctttctggggtatgttgtatcatagtaatggctcagtaaccacatattttgtcctttccatgtcactgattccttcatatgagactatttggcttgactaccctgtatattgtgtagaaatcaaagttcttatctgtacatttctggtccaatacctgtcttattagttgtccttccccactaaagtttgcaaaacagaaaatgttactatttctggtatttaatgacaatgaaaggtttggtcatatttcatagtgcagtagcgataaggagggtgtctcaagtttgcttttgtgtttcttctaggctttgttcttgattttagacagatgagccagtgttaaggtgctacttcagagaataaattagagaaatcagataacactgtgccaaggtatactttgtagatgctaagcaccgattggccctccagagaatgacaatatccctttgatacctcactcctgatcaatctcattcattaacctcagcttctcaggaatccttgtagcttgtatgctagaagtagctatggtatatggtatccactatatgtccagtcctatggtttggctcaaaggttggctaattgcagctagagctctcaactgctagctcagcaccttgacatttgaagtttcttgtcttgaggagaaggaaaatgttctttctgccattgccactttaacagttggacatgcttaagcaacaaatacagccagtatagggaggactgtcagtagcatcaaatggccacatacctcaatggcaaaagactagatggtttgtgatttaaaaattaatgagtcgagatgagactattttggtattaaatgagaaaattgcctaacacaagggaagggtttacaaaagaatgccaattagtgtttcaacagagttaggattttccaagtaagagtagctggtagccatccagccataaaaggaacgagagtctatagatttgtaaaagtaaaactgctatattttgtatcttcaaatcttcaatataaagaatttaaagaacctgaaacagttaatgcatgattcgttatattggagggaaaaagcaggggactgataatacaaaataatggcaactttaaagatcatttctacgtggatgtttggttagaaacatattccaatgctctcctctttctctggccacagcatcctggctcagcccagctgtggagtagaggtggtaagatccacagaacagatatcctctggtagataagctgacattgatgatactttgaatttaccagctggtgaagcaaacgattaatttgtgattgaactgaaaagcagttgaattgttttgacaccagaggctgaatctaaaccctttacaggaagagcagagcatactatacatttcttagcagatcttcaattctgtttgaacatgatgaagtaaccagggtttagtgagatctaaggccgtgaagtaattcacaaccaagatcttatgaacgcattcagatgtgaggggggcaaatatgttttcaaaaacttagtgtgcaatagagtccattatagaaattaaccactgctatatgttttaagtagttcaatcacctgttgtggttcagtcttgattattgtttattttgttaggtgataagtaggaagatgcacttgttatcccacactatctcttgttttgttttgttttgtttttaaataatgaacagtgcaatctttgaacttgagtttttaataatgatagcaaagacaatggtgagaacttgaaacagccagcatattttatattgccaaagtacttactgatgactgaccacactgtcttgtgaggaactgggtcccctgcactggatcagagccaaatgcaagccacccatcagttcagaggaagcaggaaaacatcttttgggtggtgcatagaacattgagctcttaaaaacccggagaaaaattaggaatttagaaagtaagtgggaggtagaatattgagtccttttttaaaaaaaagaattgatgtctaaatatgtagtctgaacttaagtgtcctaaaaccttgttttttgtttttttgttttttgaggagtcgtcttgctctatcaccaggtgggagtgcagtggcacaatctcggctcactgtaacctctgcctcctgcctcccgggtccaagcaattcccctgcctcagtctcccaagtaggtgggactacaggcgcacaccaccatgcccagctaacttttgtatttttagtagagacggggtttcaccatgttggccaggatggtctcgatctcttgacctcgtgatccacccatctcggcctcccaaagtgctgggattataggtgtgagccaccgcacccagccaaaccttgatttttttagccacctctgggattgcctgggttccctttggagaagaaactaaaagttatggccatagaaaaagccctggtaagaaaatatttgaatggtgtaagatggtggaaggaaagccatcccacacccctacaacatatgttctggcatttataaactgcttgattgtgtgcctcaaggggagaaaaagtcaagcaatgcttcaaaggccaggctttctaagcaaatgagtggttcaaagcagtgtttggctcaagggcagtctggttttatggatagggccgacccaagacatctgctcatgaagaaatgtggcatctgttgccatttcctaaactataaggtttagatagattgtcttgaattttgatagcaaatttttttaaatttatatttctgcctcctcgtacatccttatatatggaaaaaaaagtaagagttcctcagatcagagctcagtagctgtgtcaatttgaagttcaatcagtgtagttgtcctggggtgatcgctgactctgctctgtttcatatttcagttgcttgctccaaggagagaatttctgagaacaatgggtgttagcaactttaagttactccccaaacgtttgctggccacattctcatttctaaacatctggatctgggtaaaggtttgaatagatgtagggaacaaaattggtttttccatggtgtagtctaattttgccaaatcacccaagaaagaaagtatatgacgtgtggagtttgcatttcttggatgggacctatcgggtcacccagcccagtcttacagtcataaattcctacctcttagttcctgccaaagggccttcagcctctgtgtgcacacttattgaatgaatgctttgcctaaagtttggccttttgaagaaaaacagcatgtgataatataaaaatatgagagtttaaaaaaaaaaaagatctctgcctctcttctctctgcctcgtcccaccttgctgtctgtctcattgtctttctctcccctcaccatgcgctgaattcagatttctctttcttttattataggcatgttgttttgaatgtggactttgtgggagggagaggattgttctgagaacagaaactggaagatacgtctgagttgatgggaccaacagggctttgctcctctgtgagggccaaagccattgatacttgtcgggggtgatgagggctttagcatctcaaggcagacatatgaagtatttactgctaaactatattacttactagtacaaatctgttggaattcaggggcagtctaagatttggtgagtgaaatgccatctggcaaaatcgagaagagagtgtggcctgagaggggaatgttcagcctcactgtcacattaagggtacctcaaaatacatggtccttccagtgtgttccttttccttcctccatttcactttgtcccctcttcttcctttctctcccattttcctggctttttagcactcagcttttttttataagtatgtatttactttttattatatatttggtcctttgggactttgtgatgattaagaatttattccattcaggattttaaaatgatgtgtttaatattttgttctcttaaactcttttgaagctatgctgctaaccaggtataggccagaaaggaggtggcccagtcagtaccttgctcacgtcagctaagggggacagtgatgtcatgtgggtgactcttcttcatttgaccaaggccagcctcctgttcttacctctgcccattcatttctggctatgggaaaactaccacctgttgagtgagccaatgaggccaggaagatcagaggggctgggttccggcccatgggccactatttgaatttctctgtagtaagctctttgtagggctggctccaactgcagtagccaaagaaaacctgtctgactcgacattttaatgcctgagagttggtgaaagttcagctgaagctaatgtctagacatcagcagtaactaggcatccagaaagtagcttcaaccaaagctaatagagcccaagtttccgcaggaagtttggtgctgagctgtccagagcagttgtttatctgagtgttgctagcccttagccatgctttcttagctttattctcgcctgttcctaggcatagcctgaaccagagctatggctcactgctcgctttattctactccctagtcatgcggaacaacatagtctaaaaaggaagatgtggactggggagttaggagacctgatttctattccctatgcttctactaactagcctcgagatcttaaccgctctgtgcctcagtgttcccatctgcaaaatggggatagtgttaattgccctacctacctcacagggttgttgtgaggataaactgagacaatgaattcaaagcaagttgacaagtaagtgctatgcaaattgtaagaaatggaaacaatcatgttaaaagcaatggaatggacattggcagaagggttaatggattgtccagccctttctctgtgtggcttaaacccaggtcgccattgctttatacattttcacttagcacagatttgtaattatgcatgtaataaagcacagccttatccaccctg

SEQ ID NO: 16880 - DNA, 207 bp, Homo sapiens
cagcagccacagggctaagcatgcatgttaacagggtatatttattctatgttcgaatttgtcttttgatcgcttttattcatttttcctttctttgtcttttcccaaactgataatgttataaatatttatgttgcttgtttttatgaaagaaaaaatattgtcatatttgactacaaatttaataaaaaattaatggttattgtt

SEQ ID NO: 16881 - DNA, 1286 bp, Homo sapiens
tgaatggcatagatgttgttcagatttactttgaaagaatcaagtatgtgaatggatggatgaatggaattgtgaagcacagatgagctctttcacactccaaggacacagctcatcctatgcttttggacacttcttccctgtttattacaatgactattctccaggttgttgcactaccgctgtatctgtacataattctaacttggcacctgtggccttttttgtgctcttatgtgtctgtatttcccggcagagtatacgcccttgaatgccaggaacttgtttccttagtcttttttatatatctagcatataagatattgcttagaatatggtagacatcactgaagatttgtttcagtagttcatattttgtaatgatactgaatggttaaacaatccctttctaatctgtctagcatatatgtgacttttgtttatcaagtgtcacacaactgcttcaaggcagctgtgagatactagaaagcaaaaattcttactcctatgtctgtgtcatcccagatgtgtgcctccagatggcagtatactacactatctgtaaaatatatttgcaaagccaggcacagtgttacgcgtctgcctcaggaggctgaggcagaagaatagcttgagcccaggagctttagtctagcctgagcaatataatgagactccgtctcttaaaatatttgcccaaacattgaacctaaatttgaccatgcccctagaaataattcctaatctttagaaaatagggcagagaaacattattttacaccatggagatgagatcagcagaatccagactataagaaactacaggacacatgacctagtttcttctgtaaataacttgcaaggatgaaagatggaggatgaacctatagatttaaagagacttaagagacatattaaccaattgttaattggatcttatttgaattgtgatttgaccgaactgtaaaacgaatacatttatgagacaatcggggtaatttgaacattggtggggtatttggtattagaataatggttttatcattatgttagaaagaagggtcctcatctacattctcaaacatctgtggctgatatgatatgattcttggaatttgcttcaaaataataagtctggatgttaagtgcattggaaatattgatgaaacgaaattggccttgataattgttgaagctgggtgatggctaaaatgatggttcattatatatgttcatctctatttttgtatgtttggcattttccgtaataaagtttataaaaataa

SEQ ID NO: 16882 - DNA, 307 bp, Homo sapiens
ccctctataagcatcctctaagacccacagaaggaatcaacatttacccactttgtgaatgggctgcctgccctgtagttagctgcgaggtctcccaaagttccagccgttaaccaacatcctgagtagtttagaagcctctcctccccatgactccaccacctagcacttaacctgctgttggcctttgattctgggccaccttcttcctcaagagtttgcctttgcccttgagctgagatttctgttttccaagttgcttttctgttatgaaatgttttaattagtaaaataaattgttttgttt

SEQ ID NO: 16883 - DNA, 420 bp, Homo sapiens
gcaattttcttgatgcctctgcaagatactgtgaggagaattgacagcaaaagttcaccacctactcttatttactgcccattgattgacttttcttcatattttgcaaagagaaatttcacagcaaaaattcatgttttgtcagctttctcatgttgagatctgttatgtcactgatgaatttaccctcaagtttccttcctctgtaccactctgcttccttggacaatatcagtaatagctttgtaagtgatgtggacgtaattgcctacagtaatgaaaaattaatgtactttaatttttcattttcttttaggatatttagaccacccttgttccacgcaaaccagagtgtgtcagtgtttgtgtgtgtgttaaaatgataactaacatgtgaataaaatactccatttgaaactc

SEQ ID NO: 16884 - DNA, 207 bp, Homo sapiens
atattgctatcaatcgcagtagtctttcccctgtgtgaggctgaagcctcagattccttctaaacacagctatctagagagccacatcctgttgactgaaagtggcatgcaagataaatttatttgctgttccttgtctactgctttttttccccttgtgtgctgtcaagttttggtatcagaaataaacattgaaattgcaaagtg

SEQ ID NO: 16885 - DNA, 210 bp, Homo sapiens
gcaccgttgacgaactgcagcgatcttactggccaagccagagcgcctcctctcagattccttctcgacacagcaccctaggcggcttcttcctgtcagtcggaggtggcatgcaagatgaagctctctttgctcttcctgctttcattttgtgcttttccttgtgttttcatgttttgggtatcagtgttacattaaagttgcaaaatt

SEQ ID NO: 16886 - DNA, 86 bp, Homo sapiens
aggaagataagctgaaacaacacaaactgtttttatattagatattttactttaaaatatcttaataaagttttaagcttttctcc

SEQ ID NO: 16887 - DNA, 110 bp, Homo sapiens
gtgaagagcaaccacaagtttaaatgaagacaagctgaaacaacgcaagctggttttatattagatatttgacttaaactatctcaataaagttttgcagctttcaccaa

SEQ ID NO: 16888 - DNA, 627 bp, Homo sapiens
cctcagggatacgacacatgcccatgatgagaagcagaacgtggtgacctttcacgaacatgggcatggctgcggacccctcgtcatcaggtgcatagcaagtgaaagcaagtgttcacaacagtgaaaagttgagcgtcatttttcttagtgtgccaagagttcgatgttagcgtttacgttgtattttcttacactgtgtcattctgttagatactaacattttcattgatgagcaagacatacttaatgcatattttggtttgtgtatccatgcacctaccttagaaaacaagtattgtcggttacctctgcatggaacagcattaccctcctctctccccagatgtgactactgagggcagttctgagtgtttaatttcagattttttcctctgcatttacacacacacgcacacaaaccacaccacacacacacacacacacacacacacacacacacacacacacacaccaagtaccagtataagcatctgccatctgcttttcccattgccatgcgtcctggtcaagctcccctcactctgtttcctggtcagcatgtactcccctcatccgattcccctgtagcagtcactgacagttaataaacctttgcaaacgttc

SEQ ID NO: 16889 - DNA, 85 bp, Homo sapiens
acgaagacaaccaaaagaatgcaaactggatttatccgagatatttgacttttaaaaatctcaataaagttttccagttttctcc

SEQ ID NO: 16890 - DNA, 689 bp, Homo sapiens
gacgtgcacccccatgggatggagacccgaagggactcagacggagccgccgtgttggcagcgcctgggtgtgggcccattttggggaccaaacagcaagctgtggtcggatgagtgccaggacctgtgtaccgggacacgtgggagtcctcccagcatgatgcttgactgacccgaggaaggtcctcatgtttcgtgcctgtcattctcggatggctgtgaggcattccttggcaagggacgctgcgtaccagcggtcctcaccgcatctcacatggctcctgtgatgcatgttgtcgctttcccacccgggatctccatctctcttcccttcctgctgtcagtaagagatcacatgtctgtgtagtgtgaatgccttgtcgctgtcctgtgcttttgcaccattgagttgactgcctctgagaagcagcactaggcctgttgaaatgcaatgtgctgccctgagatccagtttcaagaatgggcaggtaaacgcagtgtgggaaaggaatgtggaatgagaacttggtggttcaccgctgtactatttgtgtaaatgtttacgtatgtgataagctacatgtatgtaaatgttgcaatacccctaacagtcgagtagtagtctcccttacaggaatttttgacggggttcctcatcatcaataccaaataaatatatgtaggaatgg

SEQ ID NO: 16891 - DNA, 317 bp, Homo sapiens
agcaggctggtaggcagacaggcagagagaaggtcatggccaccgtgatggggccaacagcaagggaggggtaggggcccatacaggagtcctcctttctgagctccagccccagcccctcgaaccacctgtaatctaggcacctttgccaacacctcccaaggatggaggactgggcgagggactgggaaagaggcatatttagttttgtggggcctgtctccgctgcctccttctccacttctacaatctcattctctctctctctctctctgtctctctctctctctctctctctctctcagaagtgacaattc

SEQ ID NO: 16892 - DNA, 600 bp, Homo sapiens
gggttttccccttttggggatcacctctctgtatcccccacccactatcccatttgccctcctcctcagctagggccacgcggccccacattgcacttctggggggtgaccgacttcgtacacgggtttaaagtttatttttatggtttagtcattgcagagttcttattttggggggagggaaagggggctagtccccttcttttggccctccgcccccgcaggcttctgtgtgctgctaactgtatttattgtgatgccttggtcagggcccctctacccacttctcccagtcagttgtggccccagcccctctccctgtgctgtgtggagtggacaccctgacccccgaagcggggagggccgctgtggccttcgtcacagccgcgcagtgcccatggaggcgctgctgccaccttcctctcccaagttctttctccatccctctcctcttcccgccgcgccgctagcccgcctcggtgtctatgcaaggccgcttcgccattgcggtattctttgcggtattcttgtccccgtcccccagaaggctcgcctctccccgtggaccctgttaatcccaataaaattctgagcaagttc

SEQ ID NO: 16893 - DNA, 1166 bp, Homo sapiens
ggcctagtggggatctgtcctaagctgagtacagcagccaggggaccagaactgtgtggggaggtccacttatccatagggttggtgctgaaatgttaggttgtgcagaccccaacctccctgacttccttcagtaactgacagtgtagcattgttcttgattagtttggcactccattacgtggaggcagcacagtgcagacagacctaatggctctgccacttactagctggtttgggcaaatgaattttcccttctgtgcttcagtttcttcatctttaaaatgagaataataatttataccacatagagtagctactattatgatattgtctgtggccacatccttctcttccattagaagaagcccttcaagggcaaggaccatgtcttatctacttgcactgttcacccttcacatcaaccctgttacagcactctgttctgctggaccacttattgtagttgtagctaattgtgaaagtatttgtttaatatctgtcttctccctaaaatgtcagcctactgaagatgaaccatctctttcatgtctacccatctcccagttgcatagtacagtgtctgacaggtcttaggaacagcaaggagctcagtgtggctggagcagaaaaaaattgtcagtacctttgctcatgccatgccctcagcctggaatgccctttgctcttttagcctgtatacaaaatgtatttcaaggatcacctcttcctggaagccttcctcttttccaccatccaaaaccctcttaataccctgtgtacatccctgccattgctcttgccagattgtggtctatgtttgatctgtgtccccaactagacagggagttctctgaggacaggatttaattcgatggtatcattagaacccagcacatggcccttagactgagattcagagatatgaaatgatttacccaaaatcacacagctcagaagcagcagaactgacattgggacccaggtccattggaggcatcttttagttatgcgcttgagaaatcgttgttgctgcacctagttccttccacatccctacaactcggacactaaccccctcctaaacattcgtacacacacaaacacaaaacttgctgaacaaatggctggatgagtgaaacaggaatggagcaagccagtacagt

SEQ ID NO: 16894 - DNA, 119 bp, Homo sapiens
gttcaggatgtctatctctctctcccttctcctccatcaagctcacaggtggttaggagtcaaagagaaaaatgctgcatactcccaccttctaacctaggtaataaagttctgcactc

SEQ ID NO: 16895 - DNA, 745 bp, Homo sapiens
gtggggatgattggaaatggctttgggcccttatttgctgttctaagagttgtctgtaggggttttttttttgaggattgcagacctgtggactggttaccccatctccaccctctcccctgttcctctgtctggctccctccagggcaaggaaaacctagggtccttggtcttgggggtggggggaccttttccagcatattcccctgggcctttagttaacatccgagtgacgaagccgggttccccagtacagtgtcttttgggtgcggtcattgtgaggaaggggatgagtgagtgtgggtgtggctggaggaggagctagatgccggtggacagtgggcaggtggatttggggaggagaggatcagcagcagcagcagtactcagtgatagggggctggctgggtcaggaatggtgagatgaacatgcaagtggaagagagaatagttgaaaatgtgaatgaaagtagctctggagcctctcccttaccccaccccacacacacgcaacagctctgtacccctgcccagaacttggaacctcccaggaatgctgccttccttcagcccagcctccagtcctgggttccctcaggaattcgaagaccttggctaggtggtgagcttggaagagctgggctttgttttctgtctcctctaacctctttccttactccttatcccatcccatttgagttcaggggtgaggcttaagatcttaataaataataccttactgctt

SEQ ID NO: 16896 - DNA, 4938 bp, Homo sapiens
tcgactgatctcacttcccttccgctccaagcaccagttccggtggtacgggggaataccagtgaaatagtttggttctccctgaagcatctgcatattgaaagaacgctttccccactgtgtgtcttctccccctcctccagtaaaaacagtcccggctaggtgctgtggctcacgtctgtaatcccagcactttgggaggccgaggtgggcagatcacctgaggtcaggagttcgagaccagcctggccaacatggtgaaaccccgtctctactaaaaatacaaaaaaatttagccgtgcttagtggcacctataatcccagctacttgggaggctgaggcaggagaatcgcctgaacctgggagactaaggcaggagaatcgcctgaacctgggaggcagaggttgcagtgagcccagacggcaccattgcactctagcctgggcaacaacacgaaactccgtcccaaaaaaaaaaaaaaaaaaaaaatcccaaggggctgcagctgccaaacccaataccctctatttaacccctactctgttttacaagagaaataaaagaagtatcagcagagctcaggtgctaacacctgttgagggctgacctacaaaactctgcctacaaaactctcttagacaggtgaatatgccactagaagttaggttgctggtagacctgggggtccctgcgggagggtgatggtttctttaccaccccacaggagatttcagtggcaaggcatgcctgcagtgggctttgggccatgcatcttccaagtccataggtcttcacctgggtggcagtgagaaaaagtagaaagtaatgagcctcctgtgtctctggaaggttctagggatagggtagagggaagaagagaacaaacaagcctggcttgtgctgaagtgtggtaggcactaccctgtttgcgtgaagagaaaacaaagcacctgttagtagggaggctttagggggaagccccgtcttgggggcatttctgggcagattgtgaattggaggaatctctttaactgaagtactctggctggaccctgcccttgtgtgaccatgtctcctattgcaccagcatttgaattccatggctcaagagggttctggtaccatttattcacagactgtatcctcgagagagctgctatatatgggagtgtaccagccaactccttttccagtgtctgtaagtcacctcattaaagtataattagctgtctcctctgggagatcctaccccatcagacaagggcagtgagcccaagcagtgccagaggccctcagaaagggattagggtagatgattgcaactgaaacacaatcttctttctttgccagggtattttgggggttttgccccaaaatataccctgggcatagcattactgcagtcttggatgtctaccccaaacttccacaccatccttcgacccacagctgcacctttatttatttattttgctctgttgcccaggctggagtgcaatggcgtgatctcggctcactgcaacctctgcctcccgggttcaagtgatcctcctgccttagcctcccaagtagctgggattacaggcacctgccaccacgcctggctagtttttgtatttttagtagagacgatgtttcaccatgttgaccaggctggtctcgaactcttgacctcaagtgatccactcgcttcggcctcccaaagtgctgggattataggcgtgagccactgtgcccagcctcacagctgcatcttaaccttacctttgcctctgcctctcaagctggtacctcctaatttacatcctaagagtggaaccatgtgacaaggactggagtgccattggctgtggactgttcaggcagggaagtacaagaccactcttgtattcaggggcaaccaaaggagagaattacgtacttgttgagtacaaactgcaccaagccctggagacccattaccaccgttaaccctcaatacagctctgctagtaagggattcgtctccccaaatgaaaaaaaaaagtaatctcagaatgttggccgagcatggtggctcacacctgtaatcccagttatgcaggaggctgaggcaggagaatcacttgatctcaggaggcggaggttgcagtgagtcgacatcacaccactgcactccagcctgggggacagagtgagacttcgtctcggaaaaaaaaaaaaaaagttgacaggatggccagacccaagtgggcgtattaagtggtggtgctaggattggaacccaagcgtgattaaaaccctatgcaggccctttcctctatattgtactgcctccttaacaaaggaagattgattaagcccctactttgtgccagtctctgttatcaagtccgttaaatgcatttaacgttaaattttttcttttttggtttaaaaaactctagtttcttaaactactagtttttagtgtcttgctaaaactatgtgctcttgaataggctacaacttatttcacactatctcattgaactctcctggtatgtgatagtgttataatgaaaaattgcataccaggacagctaagtctattttgcaaccatacagcgtttcataatttagcatttaaaatacagacagtccccgacttttggtggtttgatgtgggatttttggtggaaaagcagtatacattcagaatgcacctctacttatgatggggctacttcctggtaaacccattgtaatgtgcaaattacgggtttatcaggaggtgaccccatcggtaatggagaagtgctgggaggtaaatattagaaatggaagtatctaaatgagtaagaaacagcatgggagcataatttggccaaaatcaaacagaactaaagtagtcatgtcggtaagaatttgggactgcaggccagttacgatagctctcacctgtaatcccagcattttgggaggccgaggcaggcggatcacttgaggtcaggagttcaagaccagcctaaacaatatggcgaaacctcatctctaccaaaaaaatacaaagattagctgggcatggtgtctcatgcctgtagtcccagctacctatggggctgaggcaggaggatctcttgagcccaggaggtcgatgctgcattgagccgagattgtgccactgctctccagcgtgggcaacagagtgagactgtctcagggggaaaaaaaaagaggaaaacaaaaaagacgttgggagtgcagtttctctacctacagcatatctcaaaggttttttttaaaaaagtattttcttaactttttaccttcatttttcaaaacaattagggtacaatttacatatagtaaagttcactctttatagttttagttatgtgagtttgtacaaacatatacaggagtgaaccactaccacaatcgaaatatagttgcatcacccccctaaaactctccaggcccttttgtagtcaactcctacccccgaccctcagattctgctaaccactgatttgttttctgcccctatagttttgctttagtatgactgtcatatcaatagaatcatacaatgagtaggcttattttatgccttcaggttttaaaaattataaacatttacattacagtaaaattcactctggtatacagttctataaagctctgataaatgtgtagagttgtgtaaccaccaatgcaaccaaggtacagaacagtcctcttagcctctccctaccaaatttattcctgctactttgtagtcaaaaccagtcccctacacccaaaccctggcagtcactggtttttttcttcgttctcttttttttttttttttttttgagacagagtctagctctgttgtccaggctggagtggtgcagtggcgtgatctcggttcactgcaacctccgcctccagggttcaagcggttctcctgcctcagcctcccgagtagctgggattatgggcgcccgccaccacgcccagctaatttttgtatttttagtagagatggggtttcactgttttggccaggctggtctcgaactcctgacctcatgatcctcctgcctcagcctcccaaagtgctgggattacaagagtgagccactgcgcctggcctttttctttgttcttatatttttgtcttttttttttttttttttttgaaacagagtctcactctttcactgaggctggagtgcagtggcgtgatcttggctcactgcaacctccacctcctgggttcaagcgattctcctgccttagcctcccgagtaacagggactacaggtgcccaccaccatgctgggctaatttttgtatttttagtagaggcgggggtttctccacactggccaggctggtcttgaacttctgacctcaaaagatccacccacctcggcctcccaaagtgctgggattataggcatgaaccaccgtgtccggccatatattttcgtcttttgaagactgttatatacatgaaattatatggtatgtagcattttgagagcgacttcttttgctatgagtaatacatttgagattcatccatatttctcagtatattaatagttcttatttctgagtcactccattgtgtggatttactactgtttgttccccagttgaaggatgtttaggatctttgcagttttggacaattacaagtaaagctgctataaacatttgtatgcaacattttgtgttttcatttatctatagtaaatacctagagttggattgctgggatatatggtaagcatatgtttgacattttaagaaacttctaaactgtttttcaaagtggctctaccatttcacattcccatcagtatgaaagtttcatttccacatcctctctagtacttgggggtgtcagtttagttttttaatttttaaattttttaatttttttaatacatttaaatagagatggggtctcactgtgttg

SEQ ID NO: 16897 - DNA, 132 bp, Homo sapiens
atattgttaatcctgccagtctttctcttcaagccagggtgcatcctcagaaacctactcaacacagcactctaggcagccactatcaatcaattgaagttgacactctgcattaaatctatttgccatttc

SEQ ID NO: 16898 - DNA, 91 bp, Homo sapiens
tggaaaaatctgtttgctgttcctgctttattgtttgctttctgtgtgctgtcatattttggtatcagagttacattaaatttgcaaaatg

SEQ ID NO: 16899 - DNA, 343 bp, Homo sapiens
accaatggaggcctggggacatctggcatggtcacccctgcacatgatctgaggccagctccccttccctgagctgcctcctgcttctccctcaaagtctcctacccttctcttcctcttttaagccctctcttcctcgctttccttcctacctagctccttgttggtgagcttcttgtgccttaatcctgtgacccagccccttacaccactttccaccttcctgtccgaagtacacggacactagctgccccaggaagttgtgtgattttaaatcacttctgtctttgctggaaagtgtatttgtgcataaataaagtctgtgtatttgtttcagggttgc

SEQ ID NO: 16900 - DNA, 103 bp, Homo sapiens
gtttcaagcaagacaaatgaagactgaaaccaagaacgttattcttaatctggaaatttgactgataatattctcttaataaagttttaagttttctgcaaag

SEQ ID NO: 16901 - DNA, 96 bp, Homo sapiens
gtttcaagcaagacaaatgaagactgaaaccaagaacgttattcttaatctggaaatttgactgataatattctcttaataaagttttaagttttc

SEQ ID NO: 16902 - DNA, 104 bp, Homo sapiens
gtttaaaccaagacaaatgaagactgaaaccaagaatattgttcttatgctggaaatttgactgctaacattctcttaataaagttttacagttttctgcaaag

SEQ ID NO: 16903 - DNA, 531 bp, Homo sapiens
gtagatctgaggcagacccttgggggtgtaaaagagagtcacaggtaccccaaggagtagatgccagggtcctaagttgaaaatgatgtcgattgggggcgggggacactgtatttgatatttgtgatcagtgatcattgttcaactgcgaaatagagtgtttgcttttgataatggaaaattgtattcgttttaaaattccgtttgttgagaataacaatatgtttaaaaatataattgaacaaatttttttctttgtttcctgtcattgacatttagtataacagttttgctaacgttctaaaatgaagtcgttccatcataatctatgatcttgtacagcacttatagaaataagctgttcttttgaagttgaaatacccagtaaaatgttgaagaaggatggaggatttcttcatatctgacgtttctgaaaccctttgtgtctgctgttgtgtgaagattgacatttaccatgattttccttagttactgcagaacatagagaaaaataaaagcctaacgaatagt

SEQ ID NO: 16904 - DNA, 677 bp, Homo sapiens
aatgccattgctcccttttggaacactgccttccttactgtgcctacttatcccctgacattcattaatctctaaacttacccagcctggttggtgccaagtctgtctttagctactgttacaataatggtgttaagtaaagttagaggtgggtacaggggagacagaacttaaatccaggtggagagtcatggaaagtcgcacgaggagagtggctgttgttccaaattttgagcaaaggaaaagaaatcctagaaacaatggcatagaaactaaggaaagaagggtgtgttttgtgaaagaaaggaattttgtttatagagagtattttcacacatgaaagtgaacagtggaatataaagcataaaaggcaggatggagccgagccatggagaacctcgagtgccatgtgaagagaatttgacttgtgatgaagaatcaagtttccccttctaccattcatcagctacatctcctttttaagtaacccattttatccttcagaacctcacttttctatttctggccctggacttctaagccttgtttctttgtcatccaattccaatattgacaaataattctaaacagctacttttagtttgtatgtttaacgtcctgtgaaatattcctgtattaaccccaagccttttgatgataaagctttattttctatt

SEQ ID NO: 16905 - DNA, 430 bp, Homo sapiens
acattgatgaatattgtttcacacaaaaattaaaagtttcctaattaatgttgtattcatatatgtaggctctgaaatgttgtgatgcttattgcttctgtatttcttctctactccctagtcttaatgtttaaccttgaatgctattaacttaaatagccattgaggagttagaagatgaattgttcatgaagtcggtgttacataaaagtaggtgatatgtaagttttctgataacaaggttctaatagtgtttaaatgtactggtaacctggttccaatagttgtgtttgcccaagcctttctcggcatcatcttgtattccttatcagatagtaagtaacctgtaagtttggagtattactgttttctcagcatgcattaaaaatattccttaacttcaattgtaaataaacttttggtgttaggg

SEQ ID NO: 16906 - DNA, 600 bp, Homo sapiens
gccgcacaggtcacactagagaagctgcgctggtatctttcctggtcgtgtgctgaggttgggacaattttttcctctttgacttcagcttgcatatggggttgaagcagcccactgagccaagttgaggagactggaggaaaagagagctggtctcccgtggggctcttcatattctaccttcacttctccactgtccagacccgtttttttcaacctccacatgggttgaattccagtgtggcacccatggctgccttcccatccccccctgctctgaaataggacatttttcctacagtaacaaaacaggaatcaaactcaaggctgtgaacaaacatacgctgctttattctttccaatttttctcttgttttctagaactcttatccatatgtttttaaaataagtacctaaaagtggtttgatagtgtcctaaacgacttttttaacttcctaaatggaaagagcataacaatgtagttgattggtaagatttacagggatttggtttctgagtttgaggcacattcccagtgaataagctgagtcccataccacactcaaaaggttttaataaatctaatcctatttcttctt

SEQ ID NO: 16907 - DNA, 1188 bp, Homo sapiens
tcacatttctgtacctggaaaaaaaatgtatcttatttttgataatggctcttaaatctttaaacacacacacaaaatcgttctttactttcattttgattcttttaaatctgtctagttgtaagtctaatatgatgcattttaagatggagtccctccctcctacttccctcactccctttctcctttgcttatttttcctaccttcccttcctcttgtctccccactccctccctctttgtttccttccttccttatttcctttagtttccttccttagccgttttgagtggtgggaatcaatgctgtttcactcaaaagtgttgcatgcaaacacttctctttattctgcatttattgtgatttttggaaacaggtatcaaccttcacagttgggtgaacaagtgttgtcctacagatgtccaatttatttgcatttttaaacattagcctatgatagtaatttaatgtagaatgaagatattaaaaacagaagcaaattatttgaagctctctaatttgtggtacgatattgcttattgtgactttggcatgtatttttgctagcaaaatgctgtaagatttataccattgatcttttttgctatatttgtatacagtacagtaagcacaattggcactgtacatctaaaaatattacagtagaatctgagtgtaatatgtgtaaccaaaatgagaaagaatacaagaaatgtttctggagctagttatgtctcacaattttgtagaatcttacagcatctttgataaacttctcagtgaaaatgttggctaggcaagttcagttaaaatatagtagaaatgtttatcctggtatctctaagtatacatttaattgtacagaaaatttacagtgtaacattgtgtcaacatttgcagattgactgtatatgaccttaatctttgtgcagcctgaaggatcagtgtagtaatgccaggaaagtgctttttacctaagacttccttctcagcttctcccataaagagaccctaatatgcattttgatttgtaattggaaatgtaactttcactgaaagtgtcatgtgatgtttgcattacttttaactgctatgtataaaggaaagtgtgtcttttgacttcatcagttatttctcttgtgcacagagaaaaatgcattaaaaatgactaaaaaaaataaaaaatt

SEQ ID NO: 16908 - DNA, 261 bp, Homo sapiens
gaggaccttctgcaaggttaatgtgtgtgtgtgtttgtgttcgtgtggtggtgtttctattaattgggtgaaatcaagcaccagcagacaagcagagaaacaactggggaatttattgactcatttagttattctttctacttttatttccttctctaactgttggtcttactaaaatggtaatatttgcttcttgcttttatgttactggaaaattaggacatgtaaatggataagtgcaataaagtttcctaaatgctg

SEQ ID NO: 16909 - DNA, 3013 bp, Homo sapiens
accaactctattcattcctcatcatgtggcttacttttattacagtcaattttgaggatattctggactaaatatttaagtgcagtcatttctttttggtttgcaaaaagagcacagccctggactacaagtttggagatttaaattctgatcttgagtttggaactgacaagttgtgtgaccctgagcaagtcagttaacctatctgagccttaatttccttatttataaattgaggtggtttgaatagattgcttttaaggtctttctgctctgtgattccttgataatacatttctttccttgaaaaatatgaggacgtttttcagtgatgtggcatgcgtttttttttaactgcccccccagccctgacatgttctttttttggcaaacatacataatgttacatcatactatgatgaacatccatgtacttttcactcaatttcagcaattatgaatccatgaacaatcttttttaacttagcctcactcactccccatgttctagtattattttgtaacaaatagcagacatctgatcattttatccataaatattctttatatatctctgaaagctatgggatgatatggaaaaaaatgataattccattatcgcaagtgatatttacagtaattctttaatatcagtaaatatccagtgagggttcaaacttccaattgcctcataaatgctacttgttttattatttttaattagtagaatcccgtaaatctcctaagtgtcttcttaatccgtatgtttccctttcatctttctttttttccttgcgattttgtttatgaaatgaggttgtttcacatgtagcatttgccacaatttaagttttgctaattgcatccctatggtaatgtttgctttcctctatcctctgtttctttaatttgctagttatgtctagagacttgatgagattgaaacatggcttttggcatgaatgtttcataggttatgttgtgttcatttagtaggtggcgcataatctgtggttttctctctttttgtggtattagcagctgctgcagataaatgcattaattcatgatgcttctgatatgatgagtcatctttgtagagttactaagcattagcaaaggaggaaatgctatgtaatagaaatattattcaatgccaaaatattttcttaaatagtcatagaactaacaagaaaaaatagatagcaaaaaaatgtgttggctgttctcactgtttatcttcctaacttcttttgatgatggaaggcagttttgtggaaattgccagccaggactttgacatgaaacagacccagggctaaattttggctctgtggtgttggataagtggccttgaataaattagttattaagcttcagttttctagcttttaactgattataacaatgcacacacatacctgacacactgttaaattttcttctcttcctgtttcttatgttaaggaaagatactctgtgttttggcatatgttggtgaatttgtaccatttttatcctctcagtccttccttttataagacaataattggagtagtttaatcttattcatgtgcagataaaagaggtttatgaagtttagggtgaagtaggcaagggaatctgtttactccctcttccctctactgaataattttccctctactgaataattttccctctaagaattgctgtgggtaataccaggagtggggacattgcccacatgcataagagcgtatctctccattcgatcagtttgtcaccatctttgctctgttttgaaagtcaggcttctctgtgactgtgaagcctgctgttccctgaaaatctgataatggagcagtggaggtttttttctttctgtgctctgtagatctcattgtttgcacttgtaatttcccagagttgaaaggaaagattgaactggaatattgtgtaaactatctgtcttacattagtgtagcattttgcaatttggggaacatcttcacaatttgtgtctcgttgttcagaacaaccctgtgaagtagttttggcaatgtctgtgttacatttcatgtaatttagccaactcccattccaactaggctttggctaaatctgacaattttatatatagcttaaaacaaagaatatacattcttttcacccctcccagtctacccatccagccttcatgattcattcctgtgtcaaggttagtcgctgttttccatttgaattggtttcttttatggtcagtttactttcttccctctcccctccctttcctgcacatccccatccttgctatgcctttctgtcctcttttataatggatatatctttttcctgccattatccctcagacattctcctcatggcacattttcttcaaatgctaacatttactgagtgtacattgaagttctgtgcatacaggaagaagttattttctgagcttagataatactatgtgtatatgtgattaaaatgaagattattttctaaagccttcaaattagaagtggatttctgtttcattacttccgttttaaaagtttttgccagagagttttgctaaatactctcttatttgctctagtgtactagtccagtagtgtttgcatgtggatgtctgtggatgacagttattgtagcactttggcagtgcactaaaattttgccactatgaaatgtttctttattgtgtgtgcgtgtgtgttttgaaatacgcacacagccacacccacatatatattaaaagtggttgtattcatttagtgaaaaacaaaaagtagatgtacttctgtaaatcagataaatgcttggaatttgattgtctacccaatcaacagttttccctctttgctctggaaatatttgtactcatatagcatatttcaaaaatgttgtcattcattaaggcctcttaaatagaccactattttttgtgtctggcagatgagtatgtcaaggattgagatgaacacataagtcttggaaattaaataaatttataaacataaag

SEQ ID NO: 16910 - DNA, 4678 bp, Homo sapiens
tatgacatagtacttatttctttatacaaatatgaatattaatactaataatacactaatacaataattatagtaactaataatttgtgttgcgctttacaagttagagtgtttatatcatttaagcgcttaacaaccctgtgaggtacgtcttactaacatcctcttttatagagaaggaaggtgaaggtcagtgaaattaagtggctagccagggtcacactgctagcaaatgactaagtcaagacacacacccaagtcctctaaatccaagtcccatgcccctttgcactgcaccatgcaggtaatggaggacaaaacccagggggagaggtctagatgtaagaaatcccagaggattccattaccagagttttcctttttctcttttcgtttctttctttctttctttattttttttttttgagacagaatctcactctgttacacaggctggagtgcagtggcactatctctgctcactgcaacctccacctccagggttcaagtgattctatggcctcagcctcccaggtagctgggattacaggcgtgcaccaccatgcccagctaatttttgtatttttagtagagacgtggtttcaccgtgttggccaggctggtctcaaactcctggcctcaagtgatccgcccaccttggcctcctaaagtgctgggattacaggtgtgagccactgcgcccagcctaccagagttttcgtagtcacatattctatattacaaagtatggatgatatatccaatttagagagcaaaagcatcaggatcagatcatatgttgaattaaccttttaggttttttctaatagaaatatttaaagctatttaaaagtaaatgcatactttattgcatggatatctgatcactcaatctatattaatgaaactatagggtcacattgaagcttctagaactatattttaaagctattattagcaattatattgcatgtatgaatatatatatttggtttgagatgtgtgtgtatctctgtataaccttttatatagtgataatgagagggtaggctctacacagtccttcgtctatagctgtataggtcactaatctgacttgatgattttaagtcacatttcatagttttaactagttatgagagagaaattatatggcaatatttgaacattgctttcttaggcaccagagcaaagcaactctgtttcctttgcacattttacctgccaacatttattaacagttcttaccttccaagtctcttcaccttagcaaattagggatcaggttgcagtcttctgcagagaaactgatggttaagctcaagttccaagcatagtatgtgtgtgctacacaagctcagaagagtttgacaaggaccaggggacttactaccacaatccacttcccttatcccaggagagatggccaaacccatgtggcattaaatggtgaataaaaaagcttcactcaaggagggactattggatgctctttggacttctgacctatgcagtattcaacatcattggatgaaatgtaatggaggacagtgcacagccatgtatccactttctcttcctgtccaccctttgggtaataaggtcaatcattggtggaacagaatttctctaggaaacaaaaccaggggattttatttgtggaaaaaggaagtttccaaaaggggatactgcatctttactaatagctggctcagttactcactttaaatccatgcaaagagtgcacttgctgttaaataattgttaaatgagttattagaaggcaggacttttggtttgggcgacaccatttgcgcaacttgtatcttgctcagggtggaaaacttcatagctaaatgcctctagaagaggtgtttattgttttttttaagctgcactaaatgaattccctttttgaatccattgtatatttcaatatttcgaaccatgatcagctcactatttcctgagctggaacttgctaacttctatgatcgttttttcatgaaagttgagaaggccgggccttggccttttgtttcttcatgagaaggtgtgacactgcctataaatgtttcttactgtgaaacactctgaatgtgaggctgtagtcagggttgtttctggtggtttgacaatggcttgcatgctgctttctggctttctgtctctgtccaagttgatcaatactgcatcttaaccaatgtttcacttgagttaaccacagctttacattctatctcctatcttctgatcttcgtataccccagcatattgaaaaagagtaaaagtattttctatcaatcaggtagatccacagagtgacagttgccactgcagtgcttgctatttcacacaaacaccatttcataccttcaacttcttggactttctaaatcggactcgtgtctaaatcagggtatttgacaatctcagatgatgctactgcctatgtgccagttagttcatcttcctaccaagatcatgaatggcaccacactatccactagctgtacaatttacagagaagcacaagattcatcttgtcacctacaattcgtcttgaacatgttcatatttagtactcagaaactgtgtaagctcctcccaatacagaaaatattttttaaggcagcatatgtatttctgatttactaaaaacgattgtcattctcctctcattcttctttttggtatgaaccaaaagcggctaggagcaatgcctcaaataaccagaaatgaccttttgttgatacaaattgtatctctttttttcctgattgtatagaaacaaatgtacaaaactcatctgaagctaggtttggcactgaattttcaccatgaggtttgtggcactgtgtgtcacagggaagtagctcaggggttgtgagggagcttttatttctaaagggcagtagtaatttatagacaaaaacaatttttcaaggcctctttattaccactgcacagctatcatgtgtaaaatttcaagcattatattgcataagttctctttagcctattaaatttaatatgtccttgcaaaagggattttgtgtaaaaagtgtcagtgttagtgactcatctgcaagaatctacaaatggagctatacaactatgaatacataaatacagcatggttcctagttattagagaaacattttctttatattgaggtctacgcacttcttgactttccattttgtctgtaattataaaacagcaaataacaaagaagcattgggaccccctcggctgccttgataataaaatcaagcttccttcatgggactaagcatgtgtccttcaggatacttacctctaagcactcagcaggggttactacaaagcgttttgtgtggttttcaaaaaacagtgtattttgcaagaggtgctttgtaattttaattatttcactgattttctgacctcataggaagtctgtgcctgttgaggccttcaattttgtagcttttctgattttttttcttctttttgtgattttgttgttgttttcattttgatctaaaggagaagtgtgaccccggagtggcatggtcaatccagggcaccctttctgtaagacaactcaaaggaaaagaagccttttcaaaggtaatatcgagccattgcactctctcttaaggtgccaggtatgggagaatgacagatgccttatggaaatggtctacaaaacttttcttcttctaagtaataaaacacatagcatgattctctctccctctctctctctctctctgcccaccccctgctagtttccaggagaatacttctctaaaattcatttttttctattttggaataaattatctttatacagtaattcaaacactgatttccattaacctttggccctgagttttcttctaacatagaagagttcattttgagaggcactcagttaccattcaatctgtgctgtaagtatgggactttgtacaaatgccctttttgagggccaaaaatttcaatacactttgttctactttgtgaaccaggtctggatctgcacagagaaagtaatgctgagctgtccaaagagtccgctcaggtctccctcctaaccctcctctgccttcccctagtttgcttatcctcacgtctgacactgaggagtgcatagtcttcaactgaaatggcactacagttagttctcattggaaacaaacaagtgtatttctggaacctgctcgtctaaaatagtcaatgcctttgtaaagactcagcatattcaatatctattgtatggtagctagctatatacatagattgactatttttagtcctggtttgtgtattgttgagctatagtagtttgctttatccatttgtgggattaaacaatactgtttaatggttgtaaacttttataaaatctctttgggttttttgtttgacccaaacataatgtaagtcttaatgacaaaatacacaaagttaaccagaggtgagtgaaaatatagcccttccccagttttgtctgcccctataatgcacgtgcattgctttgtaatatgctctcgctagcatgaatgtgctatgactacttcatgaggttttgtttcacctataattgtgatggaaaatgctgtattgctgacaacaatgaactgtaaccacagttatttactgcataaactatttgtgtactaacca

SEQ ID NO: 16911 - DNA, 2037 bp, Homo sapiens
tgggcacccagcctctagggacccctcctccctttttccttgtccccacactcctacacctaactcacctaactcatactgtgctggagccactaactagagcagccctggagtcatgccaagcatttaatgtagccatgggaccaaacctagccccttagcccccacccacttccctgggcaaatgaatggctcactatggtgccaatggaacctcctttctcttctctgttccattgaatctgtatggctagaatatcctacttctccagcctagaggtactttccacttgattttgcaaatgcccttacacttactgttgtcctatgggagtcaagtgtggagtaggttggaagctagctcccctcctctcccctaccactgtcttcttcagggtcctgagatttacacggttggagtgttatgcggtctagggaatgagacaggacctaggatatcttctccaggatgtcaactgacctaaaatttgccctcccatcccgtttagagttatttaggctttgtaacgattgggggataaaaagatgttcagtcatttttgtttctacctcccagatcggatctgttgcaaactcagcctcaataagccttgtcgttgactttagggactcaatttctccccagggtggatgggggaaatggtgccttcaagaccttcaccaaacatactagaagggcattggccattctattgtggcaaggctgagtagaagatcctaccccaattccttgtaggagtataggccggtctaaagtgagctctatgggcagatctaccccttacttattattccagatctgcagtcacttcgtgggatctgcccctccctgcttcaatacccaaatcctctccagctataacagtagggatgagtacccaaaagctcagccagccccatcaggactcttgtgaaaagagaggatatgttcacacctagcgtcagtattttccctgctaggggttttaggtctcttcccctctcagagctacttgggccatagctcctgctccacagccatcccagccttggcatctagagcttgatgccagtaggctcaactagggagtgagtgcaaaaagctgagtatggtgagagaagcctgtgccctgatccaagtttactcaaccctctcaggtgaccaaaatccccttctcatcactcccctccaaagaggtgactgggccctgcctctgtttgacaaacctctaacccaggtcttgacaccagctgttctgtcccttggagctgtaaaccagagagctgctggggattctggcctagtcccttccacacccccaccccttgctctcaacccaggagcatccacctccttctctgtctcatgtgtgctcttcttctttctacagtattatgtactctactgatatctaaatattgatttctgccttccttgctaatgcaccattagaagatattagtcttggggcaggatgattttggcctcattactttaccacccccacacctggaaagcatatactatattacaaaatgacattttgccaaaattattaatataagaagctttcagtattagtgatgtcatctgtcactataggtcatacaatccattcttaaagtacttgttatttgtttttattattactgtttgtcttctccccagggttcagtcctcaaggggccatcctgtcccaccatgcagtgcccctagcttagagcctccctcaattccccctggccaccaccccccactctgtgcctgaccttgaggagtcttgtgtgcattgctgtgaattagctcacttggtgatatgtcctatattggctaaattgaaacctggaattgtggggcaatctattaatagctgccttaaagtcagtaacttacccttagggaggctgggggaaaaggttagattttgtattcaggggttttttgtgtactttttgggttttttaaaaattgtttttggaggggtttatgctcaatccatgttctatttcagtgccaataaaatttaggaagacttc

SEQ ID NO: 16912 - DNA, 714 bp, Homo sapiens
catctggagcctggagatatcctcaggaagcacatctgtagtgcactcccagcaggccatggactagtcactaaccccacactcaaaggggcatgggtggtggagaagcagaaggagcaatcaagcttatctggatatttctttctttatttattttacatggaaataatatgatttcactttttctttagtttctttgctctacgtgggcacctggcactaagggagtaccttattatcctacatcgcaaatttcaacagctacattatatttccttctgacacttggaaggtattgaaatttctagaaatgtatccttctcacaaagtagagaccaagagaaaaactcattgattgggtttctacttctttcaaggactcaggaaatttcactttgaactgaggccaagtgagctgttaagataacccacacttaaactaaaggctaagaatataggcttgatgggaaattgaaggtaggctgagtattgggaatccaaattgaattttgattctccttggcagtgaactactttgaagaagtggtcaatgggttgttgctgccatgagcatgtacaacctctggagctagaagctcctcaggaaagccagttctccaagttcttaacctgtggcactgaaaggaatgttgagttacctcttcatgttttagacagcaaaccctatccattaaagtacttgttagaacactg

SEQ ID NO: 16913 - DNA, 436 bp, Homo sapiens
agcattggaaaccctatttccccaccccagctcatgccccctttcagatgtcttctgcctgttataactctgcactactcctctgcagtgccttggggaatttcctctattgatgtacagtctgtcatgaacatgttcctgaattctatttgctgggctttttttttctctttctctcctttctttttcttcttccctccctatctaaccctcccatggcaccttcagactttgcttcccattgtggctcctatctgtgttttgaatggtgttgtatgcctttaaatctgtgatgatcctcatatggcccagtgtcaagttgtgcttgtttacagcactactctgtgccagccacacaaacgtttacttatcttatgccacgggaagtttagagagctaagattatctggggaaatcaaaacaaaaacaagcaaac

SEQ ID NO: 16914 - DNA, 459 bp, Homo sapiens
atcaggaatgggaaattaaaaaccagtgaattgaaagcacatctgaaagatgcaattcaccatggagctttgtctctggcccttatttgtctaattttggaggtatttgataactgagtaggtgaggagattaaaagggagccatatagcactgtcaccccttatttgaggaactgatgtttgaaaggctgttcttttctctcttaatgtcatttctttaaaaatacatgtgcatactacacacagtatataatgcctccttaaggcatgatggagtcaccgtggtccatttgggtgacaaccagtgacttgggaagcacatagatacatcttacaagttgaatagagttgataactattttcagttttgagaataccagttcaggtgcagctcttaaacacattgccttatgactattagaatatgcctctcttttcataaataaaaatacatggtct

SEQ ID NO: 16915 - DNA, 1413 bp, Homo sapiens
gccttgggctggtcccagggtggcaccacccaggccccctgggcaccaagggagcgagggggaataagagcagggcagccccctgggtgccgctgtcaggagcagagccaggcccaggtggctccagctgcctgtcctgtcccctttcctaaagctcctctgcacatagaggggagaaaaagagaatttaggcaactccactcccccttcacccccaaccctgtattctactctcccgaaaagagaagagaatcgcatgagtagcaagactgctgccaccagccacctgcttgtgaggccgccacttggcatgaagcctccacagctccccgcctgcaggggcaaagaggtcgacagcaatgtgtgatcccagctctctgccagactgagagggcaagccgtcttgtttgctgcaaggatgcttttgaggttggacaggaggttctggtcctgcctttggggccaacgctggctctgaagtgtctttttcagaggaattggactggagtgaatgggcacaggggtggagcgcagggcagccccagtcaccacgagctgtttcatttgtgtaaatacgatgctgaattttatgaggctgagttaagagtgggcactgacgggcccctaatatgtgacatgacgatttggcatagatagggatgtgagagtggagtaccttcctttctcaagtctcgagatgccagtgaaaccagtattccctgacttgggtttcacactttatcgaccaccccatggggtcctgtgtagcctttggccacgcactgacactgcccaggccaagcaaaagcagagtgtggttaagagacaagggtctatgtcatcatcccttttgcttatggtagtgggctaacataacagcccctttctcaagcagagacctggcccctgggccagccagatggaagggcctatcttagccagctggagcttaagccaaacctgttctgtcccactggccagccatctttgctcacatggaaattcaaatgccattcaaaggccactggtgctttatttttctatctgctgagtaaactgaaatgagatgggtcccaaccaccactgtaattttcaagcctattttatttgtacctgtaaatactgtacagctaatatatatatatatatatatatatgtgtgtgtgtgtgtgtgtgtatatgtgtttatagagatacacacacatatatatgtgtgtatatatatacacatacatatatatacacacacgcatttgcacagacacacacatatatcaattctcatgagtgtattataatctctggtgggggcaagtgtctggaaggcctgaggggcacttcagatgagaatggagaggtagggagccaggtgcagcaggatccctcaaatcaataaagcattaccagagatgc

SEQ ID NO: 16916 - DNA, 1505 bp, Homo sapiens
gtgcccggcacggcctcaggcccccgagggacagtcggcctggaccggacctctcctttcgcccccacaccccctccccttgccagctgtgcccacctttgtatttagttttgtagtttcttggcttttataatccccctttttccctgccccctgggcttcggaggggggtgcttgtgcccctaacccccatgctcttgtgccttccccctctggccaggcctctgggctccgtgggggcgccccttcttggaaggcagggctggacactgatggacagcaggcagggagacagtcccctggccctgcccctccctcgccccccttgccaccttcccaggactgcttgtccgctatcatcactgtttttaatgcttttgtgttcattttttagctgtcaactcattttcatctgttttttgaagaaaaatggaaaaatgtaaaaggcagcccctccccaggctttgtgagcctggcccaagccagtacaagagggcctggggcacgatgtggtcagccaggaagcataggatgccatttcttttatagattccttggtatttctggtggggtaaggggcaggccagggctgttcacgcccatgagggaagaggaaagtgccactgggcaaggtgtcccaccctcccctcctgaccctcctacgaggcttatcctggcaatggggtagtcactgccacccttccacacacacacacacacacacacacacaaaaaaaaatcccttccttgtgggattcttgggcatctcctgcctccctcactctcacggtaattaatgtcttaattggctgttgcctggggaacaggagagctgctgcaggcagatgacctcatggggggtggagggaggtgaggtgcccaggtggctatttgccctgcagagctgggagtttcacccccaccccccaccctgttctctccttacctttggcatcctttggcctggtggggaaacagaggcccagggtggagacctaagcgggtataagaccaggtggcctgctccttttctgggccctagcacaggtgggtaacccccacccaacccagctcctgctgctgtcccagtcttgggctggggcctggaaagaggaagaggctgcctggggctgggccagcccgctgtgcactttgaccccagttccttgccagcacggctgctaacagactgccacttgagtgcgccttgcaggcactcccagagcagccatggaaggagctggccctcacaccatccacctccacactgcctcctggccagctgcccaccccagtgccaggtgggagagggagcagaacagccagccccttccaggtggcagtcggaagggtttttgtttttgtttctgttgccatttgtgtaaatactagtctttttggaaaaaaaataatgtaaagatgttttgtataaactctgaattattttcttgttgcttttttcttagaaaaaaatgagaactaaaaaaaaaaaattaaccacatgg

SEQ ID NO: 16917 - DNA, 2550 bp, Homo sapiens
cagtagggagggaggacagacctccaccacactgacatcagctccagctcccccaggttgggggggagggggctcctcccatgggaggtgtaggataaggtgggggcgggggaaatgggggaatgacacatcccccccaacctacccccaccccaaaagcagctccaacagaatggccagagggcctcagggagctgcaaaactcatccaggagaaaaaggcaggagcagcaagtgacccctcccaagctcccatctatggggcttagcaaaaaaagggaggaagtgggggctggatatgcccacccctgccaaaagccctgaccccagggaaggaggctgctcacccagccttggccctgcagggaatgttggggggcacagaggggagaagctctttcccccactccacattccttttgttgccaagatccttaattccctcctgcccatatccctacaggcgacggcagacagtgcaatggccctcctgccacttcagcacaccttgccccacctgggaccatcacacgtgaagcaccaggctgggagatgaggtgcacacagttgcagctaggtcggggccccagttaagctgtgccccaccaccctaggcaatgaggggcaggaaaggggtacagaatgaatggtgaaagagagtggagatacggaagggggagaggagaggagaaatgtggacagagggcttgaagacatggccgaataggctactgccacccggctttggggagatgggcgataagtgttgaggtaggctcgagaactgctccccaaatcagtgagaattgcattaggagccctctggggaaagagcacaggaactgagttgctgggcctcaaaacaaaaggctgcaggcacatggttagactgccgctgtctgaaggaccatatcttacagaaggtgcacatactcccaagggccactcttgccctggagatcttggccttggggccaaagacatttccatttccgatctccatggggaggagggacttaagcccaagtgggtcaggcctggcccaggtccttatactcccctatcttgtcctagcccaggcctccatgaaggagaacctggtggcattgccccagagctctccagagatgagcctcccctatccccaccctgtccccgtccccagcctaccaaagagtattcacacctttccatccctgactctatgggttactgtcccaattgcgaaacacccatactcctcttcaccctgtagcagggtcttctgctccagtcaccccggcctcttgcaagagaaagtccagggactggcaagaagaccctttgactaaagataatgtgctgtcatatcttggctgagaaactgttgagtcaggctagaggactggacaagagaagaggcattgagagcccccttgggagccattagccttgctctggtctgctgtgtggggttggggagtaggggggatcccacattgcctgggacatctgaatgctgatacgaatggacaggaaagggagccagagctgtatacctgggacaggccagggagcctttagtgccagcagggcctgtgtcctgggatgtgatgctagtgagtgaatgggagggcgggcctggagctgcgtgagagtgaaaccaagaagcggatggggaagggagagctggccttggtcagcttagggatgaatggagaaggaatcattcatgggcctcggctaggtcccagactgattacatgagactggggagtccttccctgccagttttctcatttattacagcctatcccccaaccctacccctgtgccctgcctacacactcccgtttggccctcagcactttgggcctggtcacataccccatccctagagtgctcttttcagctggggaggggaagaggtgctggctcctttccagacatgcttatgtataagtaaaggggcaggtgcttgggctccagagagaccctaggtactgccttctaactcctgcatcctcagaaggggaaaagggactgggaagtaaagggaaaccatatggccccagggaatggacccttggagactcccatcctctcttccccctcaccaagtgcccaggagacccctggctcagaccagcccaaggccttgcccagtggcaggggaaaggggcacctcactccacctcaaagtcatttgactgcccccatccaccccaccaccctaatcttccaccacctctccggctgcccctgccctccatcacagacagcagagccgggcagctttcttatgccattttctacactgtgcttcatgagtaggactttcttgcactagttcctatgactgagtctccaaactggtttcctagtagtcccccatcccttcctcccttacccagctatgattcagttgtctctgccctccctcttaccctgcctctgtgtttcggtgagagtctctgtatatgtactgctttctgttttgttgcattgtggggcagaggcctctctgctcttgtttaaccccataaagaaataaatggtaagacttgatgat

SEQ ID NO: 16918 - DNA, 3860 bp, Homo sapiens
attccccccattttgcctctgtccgtgccccttccctgggtttgggagccaggactcccagaacctctaagtgctgctgtggagtgaggtgtattggtgttgcagccgcagagaaatgccccagtgttatttattccccagtgactccagggtgacaaggcctgcttgactttccagaatgaccttgagttaacaggacagttgatggagccccagggtttacatgaagcagaaccttctttggttccatgttgactgacttatggcatgactcttcaaccccgaggtccctgttgtcagatctattgtttgttgcactaaaatgaggatccagggcagcaggccagagaaagcaaaggtgcactccagactctgggggtggacatctgaccccaagggggctgctgctcctctcttgggtagggtagtggctggggtggagtgggaagggagcattgcagcctaagaagaaggccagagagggaaaaggcaggtgcttttggcagagaccataagagaaacctgccaaggagcatccttggcagtgggaatgttctttctgctctatactgtggcctgcaggagggttggagtgctcttcccactccagctgacagccacaccgtggcagcttgctgggctttgggaagtttgctgtgctttggaacaatcacagggaatggccacaaacctgcccgcctaagaccctgaatccgtacttgggtcacatgactctcattttatttacagctgtgctccacactcagaaaattccctggggtcaccttctagttgcccccattcccagcctgactagaactcctgtcttctttctccatggagcctacctctgtctgagacaggtgcctaacctgggacctgtggtcatgtgagtctgggatattctttagcttacctgggcacaaacagaattttccatttattaagcagtacaaatgtttttcatccattcctaatcaaattctgtctggggacgaagggttggacgggatgacctccagaagtcccttcaatttctagtacctgtgactcttagccctcaccacagccttctaaattcccaaatcctagactgctcctgggcattagcaaggcagagcctttttacctggcctagaaagggcaaggggtgaggataggacagagggattttgttcaagtttgctgcaacccaagtggacgttaggccaggccttatctgaaaggccagcagctgatgctgtactaacccagtctttcttcactctggcttcaaaaagccacagcagagcattgtcaccgcaggtgctcatgctgctcccctaaagccaggctcaggagaagccagtgtctaggcactgagcagggatctgccccctagttcaggtccaaattcaccttcccctaaaccccaagcttcccaacagatcatatggtaggaccctcgagagccttacttcaaagtgcctgggctcagcctggtttctgggtgctagatccagcccaaacctgggaaggccagccttgtacagtctgctcctcttgttcctgaaatgtgtttccttttcaggagatggggaataatttccttcaggcagctgaaattcaccaagaacagcgggtacttatttctcagctgtgccttccctttctaagcaaccacactgcttggcccttcaagggtcagggtgagacgtgatgggctaggcctccgttgtctggttgctaatgacagccttgcaacccaaggtgaggtgaactccaggcatgtgtctggccctaactcctataaagtgcctcggacagtccgcagttgtagcagaaaccaacaagaaccactccttcatgtttggaaaataatttctcttgtattatctcctttgaagaaggcaaggctgataatatgacaaacatcattgtttagatgaggctcagagaggtagcactctcagagtgttttgaccagtttaagccgcagacctggagcttcagccaggtctgactccaaagctgttccattacaccacagcattgtgtggaatttgaggtctagagagaaccaataaaagtggtaattgggaactgaaatccttgagagttccggggagaaacccagagatgcctgatttcattcctcgatggtaatacccgtcctctcggctgccaggggctctgtggcaaaaagagtcagacatttctttggaaaacagcgaacagccttagagctcttgtgttcagaagaatcttcctggcacaatgttggagcagcaggcctctgggacccacagaacttgtggcctttatgttctttcacccatcctaggaaccagccaaccatcatgtgtagagcccctactgtgggcaaagtcctcctttcattaccctacagacagcttacaggagccagcctgcttcccacaactactagtgtgactccttatctctttccaccataccttagagactttgatactaccagggtctctcagggatggagggaagacctgaaagagaggactggttctgaggccagaaaggtgtgaggagagaggaggaaaagtcttcctaattgtgcccctaaagagcatcctgataccattctattctccagacatggaggggatgataaaggaaataggatctccactggacccttgattcattctgaaccctccaaaggaactctagagggcgagggatgatgagggaagcaataggtagctggggagccctattgctgctaagtcattggcaaagtgacaaagcaatttactgatgagagaatgtggaaatagatgtgcagtttggaattatgttggtgtgaatttgccagaggaccaatgcttgcatggagaatgggacgaggacatttgtgggcaagcagatgacagaggtttgaaggagaatggcatggcaggagtctctgccagttacttgggcttcaacagccaagctggcacaaaagacagctggcggaggctgctcggctactggttacctggagaagtagtatttgcctatttcccccttcatccatcctgagccaaatttcttttgctgaacaggaaagagctaggaaccctggaggtaaacaaagactttgatccatgtatgagtgtatgtgtttatgtaacttcctgtggatgcaaatagattcagagaaatttagagctaaaaaggcccttagagggaatctagcccaacctacattccaccctgttacttatgtagaaactgaggcccagagagggaagatgacctgccccaagtggtgagcaagcaccaacctccagactcagcagagtgagggggtaaagcagttcctgtcccacatggccatcttctttcttccacccacaaactccaggctggaagtacttggcccccttcaggagcctggccaggcagggagagagtagctgcagccttcatcagaactcttcctcctcccaaggcattctcccagctctagcctctggactggaaagcacaagactggcccagtgccagcaagtccttaggctactgtaatgctgcctcaggacccatccctgcctggaggctcctctaggccctgtgagcacaaagaagaaagctgatttttgtcttttaatccatttcaggactctctccaggagggctcggggtgtgtcatttctatattcctccagctgggattggggggtgggctttgttgtgagaatggcctggagcaggcccaatgctgcttttgggggtcagcatccagtgtgagatactgtgtatataaactatatataatgtatataaactgggatgtaagtttgtgtaaattaatggtttattctttgcaaataaaacgctttccccgtctgttcttg

SEQ ID NO: 16919 - DNA, 547 bp, Homo sapiens
ggcgagggccctccgccacaggggcctgggagcactcagcaacctcgagccaatttagagggcaggaccagggagggaccaggcgagcaagggagaagttgcccagggcaggttgtcttcggtccctggcccagctaatccagactccctggggaccccttgacttggaaagtctcgcgcgcgcccgcggcccctggctgcgggctgcctcgagaaaagttggcgacgctcccgtcgaggaggtgcctgcgctgccccccggccgactaacggcttggcccttctgctcgtgatgaggttctctgcccgcggtgcttgttttttcgtgtctagagctgatgccagaaccagcaggctcccctttggagttggagctgtaaacagctgtaataactgttccacgcccgcccgttgaaacaacttttaaccgcattttcagcgcgggtccttgtgcgctgaccagaacgtgggcttgttcacacttacctgcaatttgagactgattgtcctcggcgttctagtgaggatcagcgcccctgaggaattc

SEQ ID NO: 16920 - DNA, 451 bp, Homo sapiens
atggccctattgaatttcttcttccctgatgaaaagccatactctgaagaagaaagtaggcgtgttcgccgcaataaaagaagcaaaagcaatgaaggagcagatggtaagtctactcagttgatcctttatcacttctgaattatttgttagtaaaagtatccttttaagaactaccttcttggtagggcatggtggctcacgcctgtaatcctagcactttgggaggcccacgcgggcagatcacttgaggtgaggaattcaaaaccagcctggccaacatggtgaaaccctgtctctactaaaaatacaaaaaaaattagccgggcctagtcccagctgcttgggagactaaggcaggagaatcgcttgaaactgggaggtagaggttgcagtgagctgagactgtgccactgcactccagcctgggtgacagtgcgagactccatct

SEQ ID NO: 16921 - DNA, 190 bp, Homo sapiens
gttgtgtcttccctctgtccactctcagcaccttcactctgaagatctgttaaaagcacacgagtcgtctcagtccctcagtgggagctgtttcacctggcgtcatctagtcagccatcttcaataataactgttaaatggacatttatatccactgaaaccactaagtgaaataaagatgtgtttaggc

SEQ ID NO: 16922 - DNA, 788 bp, Homo sapiens
gccccaaggcgctgagcagccccgggaaactgtcgccgtcgccgcatctcctcagtaggctcagtttattttccccttttgcttttctctgtttttcttttccttccttttaatcaaaactacccgcccccgccccgcccccgctttcctaaccttgctgctttcacagggtgggaaacgaaattcgagggaaattccccggaaatatgagggaaatctctgcattgcaccaccagaggggcataaatttgaaagttctaacctcttcttgcccttaagggtcttttacctccctcaccaactaagatttggtcatgttgcgtataacttcaccacaaaaatggaaatattggccgggcgcggtggctcacgcctgtaatcccagcactttgggaggccgaggcgggcggatcacgaggtcaggagttcgagaccagcctggccaacatggtgaaaccccacctctacaaaaaatacaaaaattagccgggcgtggtggcaggcacctgtagtcccagatactcgggaggctaaggcaggagaatcgcttgacgggaagcggaggttgcagtgagccgagatcgtgcctttgcactccagcgtggaagacagtgagactccgtctcaaaaaaatgaaaaattagccaggcaggttggcgggggcctgtaatcctagctacttggggtgctgaggcaggagaatcaactgaacccgggaggcggaggctgcagtgggccgggatcgtactactgcactccagcatggaagacagcgagactccgtctcc

SEQ ID NO: 16923 - DNA, 340 bp, Homo sapiens
tcttcccacaacaccacaggactgcagggtgcacaactcccctgccaaggaaaaccatgcagtcctcccctccctggtctcctgcttcagctctgtacaacgagggcaaagatgctaaatcttgctttgcattcagtaaagtgtcaagtgattaagtgtgtatttgtaccctagatgatatgaaccagcagtcttgttttggcatcatcctcatcatgttgtattccagcttcttaagtggaaggaaaagagtgctgagaaatggctctgtataatctatggctatccgaattctctgaaaaaataataaaagtcccctctattatatgagcctgtacag

SEQ ID NO: 16924 - DNA, 597 bp, Homo sapiens
caggagccacattccccattgatcaacccccaaagccatgagggatccaagtagagccacagaaaaagaagaattccaggagagggaaagatcgtaaggatgagagaggagaccatccaagccagaaattatttaataaatcagagttctagcaatagagtcctctcccaagtggctgaggcaggcttaggggaaagaaccagaggggcaggggaggactggggagggctggctagccagaggagttggctgtatcacccctggttattttagggcaacaacccagttggggagtcttatgaatcattccagccaactctctgatcacaaagaatactgtgcccctttctcctaaaccttagttcaccatcactacgtaggtttagacttagaagctttatttggaacagggatagtttgtttcctcttggtcctttccttacaacttgggaactgccacaaggtaaaccagggacctgaactgtagctgcctggtccaagcagacaggattccgtcagttgtgatagagttctagattggcaatgcagttacattgtttcttctttgaaaataaagttctagacatataaaacagg

SEQ ID NO: 16925 - DNA, 74 bp, Homo sapiens
gcacctcgctctggtgcccgtctgtgtgggagcccccactgtaacactctaataaatcagtttgttcagatgtg

SEQ ID NO: 16926 - DNA, 357 bp, Homo sapiens
cagcttaggctttctctgcctcatttgatggatttcttacatttgggcttgccataccagttctcctccccacctcgttttatgatacatggccacttactctcttccaattcctaggcttggggtaaaaacagaacccctgaaagtgctatcattttttcctgaccgcatctcacagctactgggtggaagcttcttgcagcacctgggaattctaccttaccttctccgacagctaaaagacatctgtagagaatacagttctacagcagctgacatacttcaaaggccaatacaattcattctccactgtttgttgttgtttacctacaccctcaataaatggttctttaacct

SEQ ID NO: 16927 - DNA, 620 bp, Homo sapiens
agttggagtcatcatctctacccccagtctggcttgggagatgctttcaggttgcagccagaaggggttttttaaatgacttctctggatttcaggtttcttgctgttgaaaaaaggaacaaagcgttactgaaaagaaggtaacctttgttggatgtgggccttagcctccaggtccagactactactctatgttctccagaagggtgctaagtcacctactgaagagagaaccaactgactttcctattgactcatcaggaaccagtcctcagtctggtcaagttgtttcttatttgtgagcagttcaggctatctcctgatggggatgaggccaaggctttcttatcttttggttgtctctgcttaatggaggagcctggcctaggatggaggcctggcttagatctttcattccacctcaggaatgaggttgtgatctttcctgtcctgaccctctctgaattatgtttcaatagtactcttgattgtctgccatgttgttgaagcaaatgaattatttttaaatgttaagtaagtaaataaaccttagcccgtctactgtttgggaagatccttctgtgctagagggagaaataaaatttcaacctgtgttcctc

SEQ ID NO: 16928 - DNA, 294 bp, Homo sapiens
atgccctgccctgcttccccacccaagccagtctacattgcccaaacagcaagggttggagagtggcttaagtggaatgcttcaggggtggtgggttgcaagtggggggagctttgccaacaggaggttttgaaccatgagggccctctgcccaggtgatgggcattccctaagctgctatggaatctgctccctttggggttttgacctgagatgtttgggaagagagtgagtaatgagaagtttctcctcaaatgaaactagaacagaggaagtaaaagggagattgctcgg

SEQ ID NO: 16929 - DNA, 3218 bp, Homo sapiens
agaatcccctccaaccattctcttgtgaacagaagaaatcaagtccctcttccctcctccctcttcattcctgtccccatggggagaacaaatgctactgttcttgtccccttttttagatatgtcaaaaaaaattaagttttctagtcctgttctttttttttttttaagtttttgtttgtttcagtttattttttgggatgatgccatctcattcatcatgtgactgtgcccattcctgcatggacctttcccaagcgctagcacaggtgcaaaatccatcagagccattgttttcataaaaaccaagcagaagtgaagagaaaagaggaggactgatggaaagacagactctggacagctgcacggcttgtgaagtgagctaaatgcaccacatgatgagatgctcctgggcatttctccctatctgtactgctgtcttgcagctctgaacggtgcaacgtaatggcgacagaaagtatcttatttatatatagatatatatatgtaatttatataaaatatatagaaattattatatatatatattatacactctcatataatatatatatattcacacacatttgggttagaaaatctatggagacttcatcaatggtactatgttattagagaaatgctttaattttcatattccaatcagatggcatcttctatcccagctggttgggaagggattgaagatggtagcaagtgctgcactaagggcactcgcatttggtcattctcttgagagctaggaggggtcagcctgaggccggagaggaagggcttttgcctggggtgagagggtgagagacttgacctgaaagcagctgctgcccctgaggtgcagccagagtcctgtgtgcggacagagagaatggctaatgatgctccgcgtggaattgcctattgttttatgccacctgatgtgtctgcatgagaggtttcctttttgttcctttttaagctgctgttaaaccaaaaccatgttgtgctactgtgtcagccttttcattattgcaaattttacttttactatttaagtgaatgcatagaatccaatttgccaaggttctaaaggcttatgaggtcctgaaggagccaggccttgtgatggagtaggtgacacaggcctggttgtcctgtcagcagaagggaaagcaggggctgggctgagaggaggacacggagggctctgctgaggttccttcctgggttccaccaacagggacagggagtcacttgccttccagttctgtgctgggatggcgggacagcacttggcttgcttggccagctgcgtcatgagtttgatttggtttttttttttttgcagctgcttcatatgctctgctccagcccctccccaacagctggtagcttatggtttcttcaagaggaaagtagactttatgctgtacatttgagctgtagagctaagattcgcttactggtgagctgtgaaaccttgttgctttttcccagagtctgatggcagtgactgtgatcaagggaatcttcaccgccacaagtgcaggcagcaggtgtggttcaggtccccccccaccccactgtgctcctttgaagccaacgtgcctccctcgcctccatactggagggacgacgcaggggagaacagagaagtgcttggccctaggattgaggcacttgtttcctagcccgctgggttagggctggtgcaagcgaggcaatgttgaggatgctttaagcactaccagccgaatccgggaactctgttaacagttgtccaaccagcagaatgaggctaactgtataaagcatgggacccaggatgaggataaggaaaggacagcggctttccctgggcagtacaatggcttgaaggcaaaaagggataaagtgacagccgactgtgactctggtgaggaggggtgagcagggaggttgattctctgatgttaactaagtggcaaagtctcaaccgtgctcagccctccccctcccagggaagagaaacaaagattcaaagtaagcatgatactagtgggtttaccagtgtttcttccaaggagacatatattttttaataaacgatagttgcaatgaactgtggctcagagaccttcttaaagtagttgagaagggagggcgtgggcaaagcagtgggaagaacatcccaaacttttgggggccagagggctctctccttagtgatgatcagctagccgagctgggccgtcctggggatcggtacagctccctggggtggtgacaggccctttgtgaaagttgtgtgcttggtcttccaccccagccccagacactgcttcaaatagcaccaaccagatgggagtccacatctgtggtggcaaaatgctgacattttcccaagaggtacacaaggtgggagaggcctgctgtagcagaggtgtgtgttagagaaagcaggggcctgatttagtagcagagaactgggtgagaaaaatggccagagaaagtgacctgccagctaccagtgtttccgaaaatgagggtgggatgggcccatttgcagagcaggacagcagtcatccccatagccctctgaggaggggagggatgcttagagcaggcagttctggcagttctgacgtggcaggtgccattgcaacttgtgcggaggagtcttaggaagtgctgtcataattcataaggtcaagagcaacatctggatgaatgagccacctgaaatgtgtgtgggctgagccacaggaagggtgagtcctcttgcttgtggtgctttatggtgtgcaggttgcttgctttcccacattctctcatttgcttgaaggcagcctaacaaaagggagtccccaaagagctccatgagagcttaagaaaattcatctcctgaggacaaagagaacaaagatctgtcctgtggtcacactgttgaggctctgtcttcacagctgatgttctcctagtggaggtacagctgaagaacattcagccccagcacgagaagatacagagcaacttggaaaccccaaagggagacacacccttaacactgccgtgctgtgctgtgccgtgtcctgaaggaggagagagccctatctcctcctggttttgttgctgacattgcagctgatcatgccttgactccttcatctctaacagaggaagaactgtattatcaaaccttatggtctacccatgaataaataaaatatttgttcaagcac

SEQ ID NO: 16930 - DNA, 1450 bp, Homo sapiens
gtcatgcctggaagctttgtcccctgcttcagatgtggagccaggcgtgttcatatctactctttacccttgagccctccccaggaatttgggaccctgctttagagctagggtggggtctggtcacacacaggtgttgaagaaattataaagataaagctgccccatctggggacgatatggggagggagatgggaggggaaaggggagagggtttttctcactgtgccaattagggggtaaggccccctctcaggagccatcatcggctttccccattcctacccacttaggctttgtagcaagatgagcaatgctgttggaaatgtgaagtcaccagtggccttacccctgcctttgggagcaggatttttttgtagagagtcttatctgagctgagccaggctagctggagcctgggatttctatgcagtggccccttaggccagtgatgtgcggtgggtgggctgtttaggggatctggaagggccaaggtctgagcactggagtggctcgccaggccaaatcacccttagaaggctgcagataacagaaaggctttttataaacttttaaagaaatataaacacaaatatagagattttttaaccatggcagggtgctagtggtgggcagaatgcttttttttctttctgaaggctttgtgatagtgacatgatacaaacactacagacaataaatattaggagacacagggaagtggggagaggtggggagtaatagtaaacacagggaagagctcccctacggaccaggtatagagaaaggtctatgcagaaataggttagagtttccctaacaaaaaagctaacccaggtcccctcattccttcaacttgtgcctgggagtgtgtggtgttagggtgcagccacactcttctatgacccagcatgggttagtgctatggtgggagagtacattgaaggcctggaattagcttggggccagggaagggactgggaggggagagaagagaaggagggaaggatttaggatggtaaagttaggtacagagacctccctgttcaaggcccctgacagctgtccctgcccttcttccccttccctgactgcaggggttatgtggaagtgtgtgtggcagcaggcagcggggaggggaggaacagggaagggggagctggggagcttggctgagggtctgggaaatgagcagggatggggggggatgtggatcaggtttactagcacctgccagggaggccatctggggctccttctccaccccagcccccaaagcagcccttcccccagtgccctttgcatcgtcccctcccccacccctgctgtgggttcccatcatttcctgtgtcagcgcctggcctacccagattgtatcatgtgctagattggagtggggaagtgtgtcaaatcaataaatgaataaattcaataaatgcctataaccagc

SEQ ID NO: 16931 - DNA, 235 bp, Homo sapiens
gccacctggaggaactgcttgtgcactggatgtggccccaccctttcctcttaattcccaatcccattcctgggctagcaccagtagtggttggggccctcccctcaggctccatttttaataagtttttagtatttttgttaatgtgaggcattgagctgttgggttttgtatattatttatatagagaccccagagctgttgcacccaatacacagagcttctttgcaaaggg

SEQ ID NO: 16932 - DNA, 1102 bp, Homo sapiens
ctccaactcagagcacagccaatctccaggctccctccctcccagatccaggaacacatgcacacacacacacacacacacgcagacacacacacacacacacatatatgtatacgcacgcacccacaccctacagcagatccacctgcacaaacatagacagatgtggacatgcacccgcatgtacaaaaacacaaatacggaagtaaacctgaacaaaccctttaaatggggacgcagatgagtcctcggtaaaccgaggacccatgaaacagcagctgaagccagctccctgaatctgaccacagacactcctggggggcctgaaagcaacagctggacacccccttggtgctcgccttcggcctctcttggaactgcaccaccgaccaactccagacttgggagctttaaagagcaggatagctcttcctccccaggacttggtcttttttctgggtcttgttttgttgatttttcttttttaattttggaacaaatgcttttccaacccatgagtgctaagagcctctggaagggagggcttcaggcccgaaggtctctctggctctaggacccccagtgctcacacaatcagaccaaggaacaagacccccaggaaggaaacagatttaagcaagaccatggggtggaaggagaaaggggctagcactggatggagctggagggtcgtaggggagagatctccaactctctctgtgtccgtgtggagggctgcagagcctgcagggtgacctgcttccccaaaggccaacagcattggcctggccagaccaggtgaccttagatttggtgaacaacgtactatggaagccacatcactattgggcccccaggtctgatctgggttttgcctctgcccttggggaaatgctatcagaaattcgccccattttctttacagtcttttgtgtctgtcatttctctttcaaaaaggcggtgttttttgttgttgttggtttttttttttttttaaagaaaagttcttaaaacactaacggaaacccatggagtttgtcctttgtaaaaattttaaacacagtgtcttgatataaaaataaaaaatccagttagcactccc

SEQ ID NO: 16933 - DNA, 643 bp, Homo sapiens
tgccacataccaggcaacctcccatcccacccccgaccctgccctgggcgagcccctccttctcccctgccggtgcacaggcctctgcctgctggggattactcgatcaaaaccttccttccctggctacttcccttcctcccggggccttccttttgaggagctggaggggtggggagctagaggccacctatgccagtgctcaaggttactgggagtgtgggctgcccttgttgcctgcacccttccctcttccctctccctctctctgggaccactgggtacaagagatgggatgctccgacagcgtctccaattatgaaactaatcttaaccctgtgctgtcagataccctgtttctggagtcacatcagtgaggagggatgtgggtaagaggagcagagggcaggggtgctgtggacatgtgggtggagaagggagggtggccagcactagtaaaggaggaatagtgcttgctggccacaaggaaaaggaggaggtgtctggggtgagggagttagggagagagaagcaggcagataagttggagcaggggttggtcaaggccacctctgcctctagtccccaaggcctctctctgcctgaaatgttacacattaaacaggattttacagtaaatgaa

SEQ ID NO: 16934 - DNA, 1090 bp, Homo sapiens
taagttgcagtgtctagtttctcaaaacccttaaaagaaggaccctttttggactagccagaattctaccctggaaaagtgttagggattccttccaatagttagatctaccctgcctgtactactctagggagtatgctggaggcagagggcaagggaggggtggtattaaacaagtcaattctgtgtggtatattgtttaatcagttctgtgtggtgcattcctgaagtctctaatgtgactgttgagggcctggggaaaccatggcaaagtggatccagttagagcccattaatcttgatcattccggttttttttttttttgtccatcttgtttcatttgcttgccccgcccccgagacggagtcttactctgtcgcccaggctggagtgtagtggcatgatctcggctcactgcaatctctgcctcccgggttcaagcttgtccaggttgatcttgaactcctgacctcgtgatctacccacctcggcctcccaaaatgctgggattacaggggtgagccaccgtgcccaacctcacttgcttcttatccttacactcccccagccccagagaaactgccacatacaccacaaaaaccaaacatcccccaatgaccttagccccattgctccattcactcccaggtgagaattcaggcaaacgtccacaaaggtcacaggcagcgtacatacggttctgttataccccatatattaccccttcatgtcctaaagaagacattttctcttagagattttcattttagtgtatctttaaaaaaaaatcttgtgttaacttgcctccatctttttcttgggtgaggacacccaggaatgacccttttgtgtctatgatgttgctgttcacagcttttcttgataggcctagtacaatcttgggaacagggttactgtatactgaaggtctgacagtagctcttagactcgcctatcttaggtagtcatgctgtgcattttttttttcattggtgtactgtgtttgatttgtctcatatatttggagtttttctgaaaaatggagcagtaatgcagcatcaacctattaaaatacattttaagcctttt

SEQ ID NO: 16935 - DNA, 162 bp, Homo sapiens
tgacaccagacagttgatgtctagataggacctcaatgattcccttagaatcttagataccaggatattgttggccatgtggcatcattgagcagcaggaggctgaaggaggggagaacaaaattgtccaaaccatgctgtttttttcccttaaataaatct

SEQ ID NO: 16936 - DNA, 402 bp, Homo sapiens
ggcttcctttgggcctccttggtcagccttccctgttctccagcctaggtggttcacctttccccaatttgttcatatttgtacagtatctgatcctgaaatcatgaaattaactaacaccttagcctttttaaaagtagtaagtaaatgataataaatcacctctcctaatcttcctggggcaatgtcaccctttgatttaaaacaaagcaaccccctttcccctaccactacggaaaagagcaagctcatttttccgtgtcctcctttatttaactccatttattgcttttggtataatttttccctggggaaggaggggaaattatgaaagaactagtaactttatgtcctcttgatgtattaggaaatttccggccaggcgtggtggctcacacctgt

SEQ ID NO: 16937 - DNA, 2096 bp, Homo sapiens
ataaagactgcacaggagaattacccctatacctgagcctcaaccttctgggggaaagggaactagataacatacttcttacttgtctgtacagtaccttgttgcagatgggtgatatataatggtaatagaatagcacagccagacttgcttcctgcatggtagggagagacacaaaagatgggaaactgcttttccacaaggaatctccgtagaattttgcggcgaccagatggtgcataggtctggaaggtctgatctcccttggtcttccatgggatggttagtgtggaggggagatatagattgtccggccgctttgtgattccatggattgattcagtcttctggatttttttttctttatattttgggtactggagcttttaaaaatgtttggtttcaggtatttttattcatgtgaagtgtatatgattctcttgagataaggttttaagctaaaatgttactccctgttttagtttctgaactctgacagattgacagggactttgctggtgtagtctttttataggttttataaaccacttgagcctatatcagtcgttttagtgtctgacctaatatttggagctatcagtgctttgttgatttagatgatgactcaagattttttctggtccatttcccatttccttttcttccctgacccccataccctcacccttaaaattctcctgtaactcaactaacaaaatcaagcctgattcaaaacatcctagggtgttttaaacacaccatctggtgccaaatgaagatttttaggagtgattactaattatcaagggcacagttgtggtactgtcattgataataatatagtttttttttttttcctaattttgacctgtttcaccagtgttttacccttgactgccccttctatgctgcttccaaaagtgatagtgtgtgtaagatttttaccttcctttctaaagttttttttttttttttttaagtgagtcctgttcttcctatttctttcagcagaaatgaaatcccaggtaagtataagtattcaagtatttgatcagtaagtcacagttatctccagtgcattaaataaccttcatcaagaaataggttataggtaaaatctctgaaggatcatctatgtattcaagtaattattttttagataataactgtcttctggacttggtcttgaagtctgtacagattcagcctcagtagtagcgaactgcactgctgtttggtttggagtacaaattagacttatagtcctcctggaacttgagttattaaaatcataggaataaaattatgggatctcaacaaagggtcgagggtttgaggcttaaacaagccaacatatgaatatatgttttgtctcgctatactgcacttacgctatccagttgcaggtaattttttgtctgctagtagtgttctagattatgtctttccaaagcgctgaggctgtgcacctattctgtagttgcagctgatgcctgaatgtatcctagctgacaaattattgattaataagaacttgaatttctggaagattcttactgttaaccaaattttgagcaaggagtctcaaaggtaattctgaaccagaattacatgttaatgaacagtgtaccttttaacagtgtaaatcacggaatatccgtgaagggatttcttaatttattttttaccggttgattgaaatatcagttaaaggttgccagcatggttgcagataaactgatgtttgaaattcgctgaaatacttaatgtggaataggataatatacttccaatgccctcaaggctgtgaccttacagccattttacatagcacatcattcctcctatagggatgaactttttcctggcacgaaaagtagccgctctggttgaagctttgcttattgtaacaggcttttatttccaggtaatatgtcttggaagacttaattctgattagagatatagatattactggaaactaattgttttttttctattgtactctgctttatcaaagaagtaaaacatttaaatcgtactacagaaattaagatgttgtcttgcgatccttaataaatgaatgatttcccttt

SEQ ID NO: 16938 - DNA, 601 bp, Homo sapiens
ccatttgctgtgtatgtgcagaagtattatagaaaaattatgcaggagatggctaggattagccttggggatgtgatgaaaacacttggcaggaattacaaggcaatgaagaattcttaaggttatcttagagtatattaatgtgagctatatcctttactggtaagaagttttagaaaagtttgttttgtgaagttaggaatattagaatttaggtactgttaagtaagtaatgttagaatttaagattcatgttattaacgatgattgaccttaaatagggactctattgctaaccattctgtgcccttgacagggtatttctgaagcccttgggatctaccttgggtcttacttgagttccatatttttcacatgtagaacaaaatgcaaaagaaaagtgagttttcaagagtggcaggttgagagaggagaatgctggaaagaggacaagtttgagaggcaacacttaaacactagggctactgtggcatctatgtagacaggaaagacaaacgtgtttcataaaattcgttgttgatggtattgattgaaactatctgagccatgtaatcaaaaaataaaagttttctgcatcttg

SEQ ID NO: 16939 - DNA, 586 bp, Homo sapiens
taaactgtctgctggctttttccttcagtcacaggagagatgagggtgagaatggagtgccagagatggaagcagatgccccagaataattatcctgatcccaagtcagtagcgggcaccctttgagggtttgagttactctaaataggaaccacgggctggccttactgcccttgagatcaagactagcccgaggcagatctccaaggcccagtttaggccactctcccctctaaatctctagtgctgagataatgaaatcaaactaggttctagcaccctaggacttcagcatcccacatccctagccaagcatgcatcctgtcttgggaactactccacctcactgtacagtacttttcattggctgcagtgaatttagttccctacatgggacccagtaccccaccagactgagttcaagtgccatggcaggctcggagccatctgaaacaacggaatatgttgccaccagcagcctctttttgtgccttccggaggaaagggagctcactttcttgggtggtttgagttctttggctcttcctggaaccataaacataatacataatgcttctcatccttt

SEQ ID NO: 16940 - DNA, 1497 bp, Homo sapiens
atccagatggcatggttgctctgcggactactgtgaggatggtgtgacccgatatatgattttctttaaggatggtttagaaatggaaaaatgttaacaaatttggcaattactttggatctatcacctgtcatcataactggcttctgtttgtcatccacataacaccaggacttaagacaaatgggactgatatcatcttgagttcttcattattttgactgatttatttggagtggaggcattgttttttagaaaaacatgtcatgtaggttgtctaaaagtaaaatgcatttaaacttaaaaaaaaatacctgagactgggtaatttagaaaaacaatagatttctttatcttgtggttctataggctgagaagttcaagggcatggccctggtttctggcaagggcttttgtgctgtgtcacaacatagtggagaagatcaaagagaaagtggacacatgcaaagaggggaaaacctgagtggcatcccggctttataacaacccactgtcacaggaactaatccattcctgagagaactaatccagtcttgtgagactgagaattcactcactcctgcaagactgccaccaagccattcacgaaggatccatccccatgacccagacacctcccactaggacccaccttccaacatttggggatcaaatttcaacatgagttttgatggagacaaataaaccacatccaaaccatagcacagggactgctaaataccccaacaacagaaatagaaagctcccctaaacaccttctttaactgagacctggctgtctcctgagaaccccacttcgcctgtaggcctctcctcagagattctttccctcccgcaaatacttctgcatctggaggtggagtgggccccttctttgctccccactgcaccttccagaccatgaccactgtacctctcaggcacttccctccattctatccttttgcccaccccctagtcttgcccaaatccaaatcacttcaacattcatgtgaaagatctatcccacttcccacacttcttgtttcttcggcctactcacctctgttgccctccctttctgctccagtcacccactctcagggccccaagtggatcttgcgatggcccagaactgctgcaccattgaaatcttaacttcaatccccacaacctcacatctttctaactttcccatctgattacttcattacactgttcagctttgttgagacttgtatgagctcatcacaaaagaagaaatcccaatgtccaataaacatggaaatgtgcttaacctcatctactgtcagggaaacgaagaatgagggagaatggggcatgaggaaggagcatgagaaaactttttgaggtaatagatatgtgcattatcttgattgtggctctggtttcaaggatgtttactaatcaaatcgtcacttaaaacgtgcagtttgttgtacatcaattatatatcaataaagttgtaaaatatac

SEQ ID NO: 16941 - DNA, 556 bp, Homo sapiens
aatcatatgaaagactgaataagttttatacattttgtttctttaaaaggtattacatattcttttgagctggagctgcaaggaaatacaaaaatttttaaaaagaaaagatattggatgctccttgtattctgtgaaagctctaagtatgggtttgtaggtgtaagagagggtggggctaagtgaatgtcaactgtagtaggtattcagtcagtctttctcaaagagaagtcaagcagactccctttaacctgtattctctttcctcccagaactatatctgactctcagtctgtcccataaattaattcagaaaccatcttcaggggaagcagatatcaactcacactattcacacaactgaaaatattgggcatcaaatagattagtgtgtgagaatcataaaataagttcctagacaacatttgttttacatgttagtcaactctgatcttccaggacaggtggtattagctccactgtcttaacatagtacgtggcacgttatgcctttcagtgttaactcctttctttttaaataaatgtttattggagg

SEQ ID NO: 16942 - DNA, 426 bp, Homo sapiens
gaacccagaggaggaggcctcaatagagcactgcctatttggtatccagtttctgaatgtgcaaaatggttaacgtccaaaacgcttaacgtctttttttaaagccttcaggtgttttataagctttttattatatggggcaactccttggctgagggtggatattcttgtacctctgtcccttactcttttggatgctggggcctttttctgtctcataaagacaggattgtgcaatctaagttgatcagtctctcagtggggttctgtgtgagttcatatgccagagtttttattcgtcttgtgattgctgacatacctgtgcactcatgtgtatacccctgcatgtggaaacatgaagatgttttcactttgtgtctaggtttatgtacgtgaacaaataataaaccgttgttgttataaggc

SEQ ID NO: 16943 - DNA, 267 bp, Homo sapiens
ggttaccacttaaatcttcccccccaccccccacccttttgctgattgataattgtattattttctccgaaaacttcactcaccgaaaggtcgatagattgaggctactctcaggcaagtgagctttaattaccatgttaaaggaggaaagagctagaaaaaaaaacctcaaaaaagttaatcattggtagatgccccacaattaacgtgttgcttctgccccacgggcaaatctagttattaaatagtcattctgagcaccaatca

SEQ ID NO: 16944 - DNA, 2355 bp, Homo sapiens
tgcctttcttgccattgtgtgccctttcccagctcttccccttcatcccaccctgctcagcatttacatttttgccaccagcacacttgttcccagacctgcgcacacagcatttcagccacctgacaatctccttggagtcaaagctccaggtgttccaaactcattaactaaattctccccagaatgcttttaaattttccagggcctttctcctcccaggatctgggaaagcttgggaaccacccctggcctttggaacctctccatatactttctaagctctgggggaggaggaggatgggacctcctggacccagcttgttagtcacccactataatcaactgccaaaggtgctactgtgtccccaggagcctaatagggtaggcccaaatctctgtttgctgaggaggtcattgccatccatatttgggagccactgggtggaggggcagggaggcaaaatgagacaagtagccttggttagtcttagagttgctgatgactgtggcttcccaagaactgggtacaagcagtgcccttattgtatggttggttaacagtctgctcccctcttcccttccttctttttttcctctactgacttctctccatactctttcccctctatttctttgtatgactgtcatagacacatgggtgcttgaagaaaggagggacccggaacttgggccaatcagcctcaccttgtcccagtccactcctaacactagcatcagtcccactcatctcaggctgagccacatctcactttttcgctcaagctatataatcctagactggaagagtagaatatcatatagggaagaaaccttaaacaccacagtgttccatgttccagtcactgatttttacaaatcttacagtccaaggcattaacctcaaggccctcccagcaccccattcttgtatacacatggcaaaatgtgaagaaactcctttcatctcagcaggtagaggaggactgatgacacgagctgccatggcgggaggaggggcagtagttattgatatggtgagccccatctctcagttttcatgacaggtctatatttctacctgggccaggccaggaaagagactatttaagaaaaaaaaaatcaattcctagcctggatcccaaaaaggtacaggcagcagttgcacatagggttggaaaatttcttttgggaaggggaagccatcccagcctttaccacccaatgtgtctcccatgctgggcatcctaggccactttgcttagagggcattaaaggtgccatgaaaggtagactctgaaccactttgatccctctgaagtaggtgactgatgcctccttatgcccaggctctggcaacagtcttactgaagaacattcccagtgcccctggctaggggcagagggcactgccaggctgtgttcagttagcacagctcacctcattaggagctcagcctctctcctcactctgcctctttgtgtctctttttctcctctctgagcctttgtctattgtgttcctgtcacccaccctttcatcatctttttgccaggcattcctggctgtcacttggagccaacagtaacttgccaccttaaggcagggtcatccccgggccaggaggatgaggttgtcctgaggggctccaaagaagacaatagttcccactcatgattttccgttacaaacaggcagctggggcatggttggcctccaatgatttcattcaaggccaaagtcctgagccccctccgctggtcccagtccagctcttatcaactccccaaaggaaaacccactggttcttagctctgtgggtaggaaggggccctagaaagggcctagttactatcctgtcagttctaacagtagtggaacaggagaatctgggccctaggagccctgtaactcccaggagagaccactgaaaatactggagcaacaatgcccctgcttccatttctccccacctcactctcaccaagtcaccagagggtggttctgtaggacctcttttgttgcttaagatgcagatggctcttaagaatcaggcagtcgcccacttctctccagatgaagggaagacattcataggtcccaaatctgcccattcagatgtcacataatatggtgggatatcaatttacttcttccacacatgtggttgtgcacatgtgagcttgtgtgcttttggagagaatgttgattggcaaaagcagcacagtattaatatttagagtaggatgcagcctcttatgcaccacagttaaatctagaacgaacaaaatttcagagctcaagacatgggacatttaaatcctcaaggagtttggaacaaaataaacagatct

SEQ ID NO: 16945 - DNA, 1086 bp, Homo sapiens
gttatttaagtaaaataattatcttatgtaatattacaatcatgttttgattttctatttgttttactgattcacttgagggtggcagagaaaaatgtgttaaaatgctttttagttttggaagtgggtatatttgaggttatatctcatttagttatttgtttactgttggcaccgaattcaacaatgaagtatatgcaactcttacaaaacataaattttaataatattctaatgcaaattactgaaccctcagtgcattaaaattatttcctaatttatgagcctcttagtttggaggttgcttgaagccacaaataaaactcaaatgagagtcagttctttgtcccactgtagtttgcattttgtttagtttggttttagctctactaaggtttcacatatgtggctattgccacattcctctactgttttctttctgatactggacatgctagtaacttggagaggagaataaaagaatgtctcctggaattttacattcccattaatgtcctcattcagttggcagacctaggatgtatggttaactctcaggccattatgtttttcatggctcatttcccaaactgcattgttggtaggtgccttgctaagctgtaatgcagtgaagaagatggtggggcatttttagtaattggaactgtaacattaatttacaagattgaaccggggatgtctggatgctgacaagggagagccaagtactgttaatgccatcaatcctctaggaaggaattggtggtttttctgaagtgtgggggaaagggtggtttcttgctggatttcatggccagtaagtaaatttaaatgcttcatttttaatttggatgtttctgctagagacctttgatttggaaattagttattttgcatgtttgtcaactgtatatgtatgaaaatagaaaaaaaccatgctttttgtaaaaacccctaagatttgtatatgttcatctttaggcttctgaaagggagagaaatcatattggaaatcagtgttggtgttctgaaatctgcttgtaaaactctcatctcattttacattgatattaaaacattttaaca

SEQ ID NO: 16946 - DNA, 290 bp, Homo sapiens
ggtatacagggaacagcactctagaagctatgactcaattgagactacaagtaccacggtgctacttgcacagacccctttggttaaatgtaaattcttgtacaattgaaggatacgcagaaggacatctttctagtctaacagtcaggagctgctctggtcattcccttgtatgaactggtctaaagactgttagtggggtgttagttgatttttcctggtatactgtttcttggctgacactactggtcaagtaagaaatttgtaaataaatttcttttggttcttat

SEQ ID NO: 16947 - DNA, 547 bp, Homo sapiens
aggaatgcatggcagtcagaggggccttgcaaggaggggcctttgagcctcagttctcatgtattggggggtgggggtgggtacatattgtatttggtatttgtgttccagttatatttatgtcttttcatatttagttctggtgtggtgtctggaaatgtttcaactgttttaatatattgtctgattgggtaaatgtgattgaccacttgctgtctctgttgtattttggtatgagttttgatagctctataaaatgttttggaaatctttccatcttgttgcattatctagaaaagaatatagcatatagctatagatataggcttttccttgaaagcttgaaaaaaattcgccagtaaaataatctagcttaaagtgataaactaacaaacaaatataacaacaactgaaaaggcactctaaattgtggctggcttccctttctgtctgctattgtatgaagaatactgatgtttacctgtatttgctttgctgtactaaaatgtaatgaaaaataaaagattaataaatgaaacataatgct

SEQ ID NO: 16948 - DNA, 123 bp, Homo sapiens
tcatcccagctggtgtaataatgaattgtttaaaaaacagctcataattgatgccaaattaaagcactgtgtacccattaagatatggcattattgaagaaataaagtacatttgaaaccttc

SEQ ID NO: 16949 - DNA, 3485 bp, Homo sapiens
aaggccatggagagtgctgccagtttaacttgtcatgcactgacacagcattcatgatgttaccttcacttttcaaaatattgtagaaggatttttctcatgctcttatattagggattctatttgagttgcgtttatctgttggcaaaaatatctttttcaaggcatcagctctgaacctagctttatttaaactgaatttccagtatatttttgttttcactaacaacagataaggtagagcagtgaggtttacaacaagccctacaattagagattgctgaactgctgctaaagtgattttttttttatttgaccaaaaaaaaaaaggcccaagaagaagaaaatgaaaaatttgaagatttgagagcatgaagatattcatgcttttgaactcaaaatattgaagatactctcaagcctgtatccctgccccactggggagcaatgactttcaaagcactgtgtataaaacatctagttttagaagggaaacagttgaaactgtttaaaaatagatgtgccttatttattgcaggctttctttcccccattctccctgcatccttgtccttgcaggtgcttttttagatgctccaatatgtcttcttttgttattttctttcgagctaaccaagtttaggtggtttttcattgattaaaaataactgacaactgttctaatattttgctcctttttaaattttgtagctcaaaagaccttaaaggtctgtagggttccctgcctcccatctttccactgttgtaaaaagtatatcaaattattccttcaagtttcctagctctgtgctcagtttcagttcactcctgccaagttggactctaagttattcttcatgtagtctgctgatctcagtctggaaacttaacattatgagccttttctgctcaaaaaattttcaaagattaaaactattatacatatacaggtcatataaaattacctggattcactaaatttgtttgttgttgttgttgttgttgttgttgttgttgagacagagtcttgttttgcagcccaggctggagtgcagtggcaccatcttggctcactgcaacctctgcctaccggattcaaggaattctccctgcctcagcctcctgagtagctaggattacaggtgcctgccaccacacccggctaattttcatatttttcagtagagacggggtttcgccatgttggctagcctggtcttaaactcctaacctcaggtgatccacccgccttggcctcccaaagtgctgggattacaggtgtgagcctccatgcccagcctaaatttgtattttttgaattgagtataatcactttgctagtatatataatttaatagattttatttatcttttagtgtttcagataacctctcaaaaagactttaaaataatgctattacacaaagctgcatttaccaaaaaatacagtaaaatcataatacagaaactaaaatttccctaggttatgacgctttttagctaaatatatactcttctctagtttaaaacatttgaacttgcctagttagtgtggttggcaaatttaggagcttgttcccattgccaaatggatttagaaattcccttgtgagtgcctggtagctaatacactggtcagagatctggtacttgtaagactatttaaatttctttgttagttgcaagatggatttcatatgcagaatatgtaaatgaagaggactcataagtaaattcctaacattttgttcccattaccagaagcaaagctgctgctaacccaacatctggcacataggatttgtactcggtaaatgttagttcttttctccccttgaggtcagtaataaatacaaaaaaatcatttttctagagcagagtcttaaaatcaggtgggggtaggggatggagttcttcctttcctaccccttttctcttttatcctttcatatatacacatgcaaagtttacaaccttattccatgctgtctttcagatttagaaaagatctaatttctgtctcagctgtcttaaagagagaactgaagcttttgatgaaggtgctattaatctagaaaggcaaacccatttcactgaaatatcaatgggtttgcatatctaggccctttttttagaccaatgcctatgccatcctccatgctttcagtttgagttttattatttattattttaattccagtggcccatcttataatacaacttgtttcttctagaagacagagctgatagggtaaatgttgaaaaaagaagcatgcctccttctccctcccacccacctcaagcagttgaacacagccagttattcttccattattatgtgtaccttggagtcatcctcttggtcttgtattcatattgtgggacagtgggaatagcagcttgtagtattgaaataatcaaagagataatttcagctcttacaacaagaacagaaaacatgctaattagaaaaagtcctgctttaagtaatatgtagccacatttgaatcctctaccacaagtcttttttgcaatcttgaactttcattagcttcaaagagaagctgtatttacaggagaaagaggtgattatggagggaatcaaaaatactgctttcagttagtagctagctttaagtcaggagttagtaatgagaaattttataaatgtgtatttctgtgtattcacatacatatatatatacacacatatatatgtacatacacatacatacatattaccatactgaagggaaatggatttatatttgaatttgatatttgaatatttgaagttctctatttatatttcatttatcactcttctgtattcactcagcaaccatgcccttagtctgaagataacaaggatactttaatatccagtgccggttcagactcacctatgtggcaccttaaacttaaatatccaaagatgccttttgaatttcaaagattaaaacacagctagagtagtagtattgtagtctcaagatgtatggtgtgtcatttgtgaaaatagaaacgttatttttcctagtttagtatcaacattttagaatgtcaaatttgatgccttgtgaacaagtaattttatattgtgctttaattttttaaaaagtattctttattcatatgtatagaatgcttaaaatagcactgtagacaagatgtttccaaaactttaagtgcgcatatcttttctgtatacagcttaaaatcaaaaatgtatgttaagagaattttttctattacttatggatcatgctttaaaatgatttttcttgatatttattttactccattttgtttttttctctgggtgaggcatctggttactggttattttaaaaagaataaagacattcctggaatcactccttttgggtttttgtttgttttgtttcttttctacatttttaagtattattttacaaaatagaaaaaatatagattcatgccaaattattacctatttttacact

SEQ ID NO: 16950 - DNA, 995 bp, Homo sapiens
tactttcctgccttttagttcctgtgcacagcccctaagtcaacttagcattttctgcatctccacttggcattagctaaaaccttccatgtcaagattcagctagtggccaagagatgcagtgccaggaacccttaaacagttgcacagcatctcagctcatcttcactgcaccctggatttgcatacattcttcaagatcccatttgaattttttagtgactaaaccattgtgcattctagagtgcatatatttatattttgcctgttaaaaagaaagtgagcagtgttagcttagttctcttttgatgtaggttattatgattagctttgtcactgtttcactactcagcatggaaacaagatgaaattccatttgtaggtagtgagacaaaattgatgatccattaagtaaacaataaaagtgtccattgaaaccgtgatttttttttttttcctgtcatactttgttaggaagggtgagaatagaatcttgaggaacggatcagatgtctatattgctgaatgcaagaagtggggcagcagcagtggagagatgggacaattagataaatgtccattctttatcaagggcctactttatggcagacattgtgctagtgcttttattctaacttttatttttatcagttacacatgatcataatttaaaaagtcaaggcttataacaaaaaagccccagcccattcctcccattcaagattcccactccccagaggtgaccactttcaactcttgagtttttcaggtatatacctccatgtttctaagtaatatgcttatattgttcacttcttttttttttattttttaaagaaatctatttcataccatggaggaaggctctgttccacatatatttccacttcttcattctctcggtatagttttgtcacaattatagattagatcaaaagtctacataactaatacagctgagctatgtagtatgctatgattaaatttacttatgt

SEQ ID NO: 16951 - DNA, 1109 bp, Homo sapiens
gtatgagaaatgtgttcaggtccagatatggtttctcctataatttttcctatgctataaactaaagatttgaagctaatgatactgagaataatgcaccaaatccagtcagatacatttgtttgaaggtatactgtagagtttttattgctgttttgttcagtaattataggtcaaatctaattacaacaaccaagatggattgccaaactcttctgcttggttggaatttcattgtatcgcattatccaggtggctagtggcatttgataatatagagatgactttgaaactttcaaaaaggtatttctattccaatgatatttggtaattaggttgggcctataaatatagaacaaattcagggatttttaaaaaattgtgttactactgatatatgctagttttattttatttttttgaactgtcattgagtttattttagcacaagaatatttttagcctaacattattaataagaaatgtgtcaaatttttaacattggtaaaatatgttatgtgcattttgaaaacagaaaacaaattgcgttggcatgtacgtgggtgggaagaaaaagaaaattaacaggatttacacaattataatcaccagcagtgtgagtttaaaaaacttcgttgtttttacaccaaattaaaattttcatgtcaaacttcaaagccagaaagctgctaaatacgtgtctggcaggtaaaagctggaaaattacttaaaacaggaaagtgtcaataaaaaaacttgagcaacaccaacatattttttcttaaaatgtcacgttatcttcattttgggaaactaggttctataaaatatttatcctccctgttatactttggagcacagcacagccagaaaggggctgcatttgtgcccaggtcaggagcaaattgaaaaaaaaaataaagtaatacaaaaaaatcaaactataaagcaaaaacatttattaaaacctgaattaatcctttttggagggaggagtagagatatataacctgaaaatacttattctttcttatcgaattttggagcctaatatagccaggagctgctgaatttgtgcccctggattggaagcaaataaaaaaaaaaaa

SEQ ID NO: 16952 - DNA, 400 bp, Homo sapiens
aattaagatatctctttaattacgcctttgtttacctacgttccttgtctttttccaaaggccagaattgtcaaccaatttctttaattgaacattgtaaaaaacaggaataagtacttttgtgtaatattcacagtcaacaggggtgtgatggtgaaggcagagtgtgaaaaacgtgagagaggaagagaaaatagatttacctgattcctctttaaaattcaagccactttcttatttaagaaacctagatcaagtttttacagatgtaaataaaagttgaatagtttaccttaaatttttttcaataagtaagttattgttaataatgcacagtaaatatgtgaatttttcctagatgtaaaaaaaaaaatctttcatataaagaccttaaattctg

SEQ ID NO: 16953 - DNA, 220 bp, Homo sapiens
aacaaaaaaccaaactgaatgtgacctgaaatgcaagtacatcagaacatatctgcaatacccaagccacagggaagaacttgcaaaacaacacagcttttcagttctgctctatcttactgctatggggaattcacttcttcaaagcaggacctatttggagcattacgatccacgattattgatgttgacatgtccatgtagtaatttttcttcaagt

SEQ ID NO: 16954 - DNA, 658 bp, Homo sapiens
taagacaatagcatttctagaacaattacatgtaaacaaatattttctttatttgtagccaaagaaatttcaacagttattgggcttaaaaagcatcattacaatacagtatttctttgttatacatttaaagatttaaagtgccttatcaaataatattcatgaagagttgtttataatgtcaaatgaaacctacaggaatctctgattacagtggccttgagcttcaaaatgagatatgcaataaatattatttgatgatactccaccagtgaaaattgatgctaagtgatgggattttcaattatactgaagctagttcaccacgttaactgcattttacacattgacaatgacaaaaagaagatggatgtaattctcatgaaagcagtgaagcaatttcagttttaaaaatgaagatcggctttcatgtaattatctagtagttgtagaagaaaatttaattatttgtttgcctcatgcctttatactttgctgttgaagaaactactaatctcaatttaagatacaaataaggacacaaactttcaagtattatattttatttatctttgtagcctaaagaccatttaatcttgaaggaacacaaagatcaaatgaaaagtaaaacactctaaataaatttgcttttattttc

SEQ ID NO: 16955 - DNA, 1602 bp, Homo sapiens
aaaatacacatgcaaccatagaaactttgatttaattaaacaccatttaaaagcaagtttccaaatgtaaaattcaagatctgtttttatttttgtacagttaccaattattttcaattacagttgatggaatagtagttaccaactatttttgatcaattaagccatcatagtaaatacaatatctataaaccaaccactttaaatgtttttcaaacgttattgactagctataataactttcaaatgttgtgttccccttgaagtgattttcaaatcttttgactacttgtgactttcaaatttactgtgacaaatatattagagatgcctgcatctttgactataacataaaaggacagattcatgttttaaaattaagatgtacagtgaagtatcaaattttttatattcagtcagttcctttgttacatttagttctttttttctattgaacaataccatcaataaatgttcagtacttaacagaaatgcctaatttcaaaagcaacagattcagaagacattaaaaccctggacttttcaagcatttttttttgacaattaaattgggttggatacaaaaatcctactatagtttaaaggaatactggaaaaaaatggttctggaaagccctggacattagtaatttgtcatctatataataaaacatttagttaatttgtggatttgaataacaataccatacagctgtgcaactactactgagatcagatacagggttttttgcccctcaaaataagttaaaacgaatgaaaatgaccagctctgaatgtgaaagctttctatcatcatctactacaaagagactctaaatggcaaacaggaaaaaaacaggcagaggtttatagccatagcatttaccattttatggcttatttgaaaaacatctttatgttgagaaacattccatttcagtaagttaaaatattttcattgtaactaaatgaagcaggtttttcattttgcctttaccaaagatcattttctaacatgccactcaagtgcctcttcgtgtgaatttttgcgtaacactataatttattcaacaactgtatacctttacagtatatctaaatatatacttactacatcgagtatactgctagaaaaatctaccagtgggattaaaaatgtattttcttcccataatgaaaataattcatgaccaatattacctgaagtgtcagaagaggagctgtcttaaattaatatggatcaggccattggaaaacttcagtatttccacttggttatgattttttgtgagtttccatttcagtttttattgaccatcacgttttctatcacaacatgacctgacagttgtatcccgataatttgccagttatagactgtgcttatcttcactgtattacaatattggacagaagtacaccaaatacggcattttcaaataaccaatatttctgagatgttttataccacagcacaagtggccatcagtatatttttaaagaattatatatcacagaaccctgaggctttaaaacactatggacttaccactttcttgacaaagaatttgtaattacaataaaatatttagaaatgaaagg

SEQ ID NO: 16956 - DNA, 1316 bp, Homo sapiens
accttaagcactgtgctttaagcatcctgaaaaatgagtctccattgcttttataaaatagcagaattagctttgcttcaaaagaaataggcttaatgttgaaataatagattagttgggttttcacatgcaaacattcaaaatgaatacaaaattaaaatttgaacattatggtgattatggtgaggagaatgggatattaacataaaattatattaataagtagatatcgtagaaatagtgttgttacctgccaagccatcctgtatacaccaatgattttacaaagaaaacacccttccctccttctgccattactatggcaacttaagtgtatctgcagctctacattaaaaaggagaaagagaaataacctgtctctcattcctaagttgcctcattaattttcatgaacaagaatatgtacctttttgatgctatattactgcgattaaaaagttcttgcaggtaatgtttatgatatgttaaacgttgtaatttcctatcgtaattataacattcccattcttttgtagatgaaacttctacatattgaaccacagattttctgagcttctaaatgtagcctttcattgcacatttcagtgatcagaatagatatccttttacacgcacaaaagcaatagattcattcagtggacaagttccttgtttaactacacagctatgatggaatgatatatccaagttccttgcctcagtgaaatatgcatatgtatatcatgaaagtgggatgccaagtaagcttaaaatggcattctctagcaaagagattagacttttaaataactcttataaaacaggttggcgatcatttcccaagattggtttcccttgagtttttgctaaaacaaatcttagtagttttgcccgtttaaaacaactcacaatcgtaaatgctactattcctaagatatcttacctttttatttcagtttagccatgtattgtatgagtgtattagtctaagcagtgagaatcttttctatgcctctattccagcaaaaagtagaagtatcaaataaaaagggcaacttttaaaatattaagcctgaagacttctaaaaagacaagaaacatggcctaaataaccaacatagatttacatagtaagtttcacactaccttattaccaaaagcaaacacctcttactttaaactacattatcatgtatatctattgtatgctggtctttactttttgccaaaatcaacatataatgaagagatgcctttgtttcatgagattcaaacttgatgctatgctttaaaataaactcagtacttttagaaac

SEQ ID NO: 16957 - DNA, 357 bp, Homo sapiens
ctggaggaagcgaggaggcggccggccgcactgggagcagcgcggatttctctttctctctcactctcttcctttcattctagtattctttattatttttctctctctctcgttcgctcgctctctcgtactctctctcttttccctcctttcctttttctttcctttcccctttttctttcccttctttttccctttcctttcctttcattttctttcctttccccttcccttcccttcccttccatctcttcctttcctttcctttcttttcttttgctttcctttcctttttttcccttttctttccttttcataagaggttctaacttctgttgacaaaggaaacacatactc

SEQ ID NO: 16958 - DNA, 2288 bp, Homo sapiens
agtagactgcatgcagagactacacagaaaactacaagatgtgtggcgttgcaaataatgatgaaaataaatcatgtaatgggtaactgatacatagagtattacctaaaccaagtttctcccttacatttccaaatatgccatttgataaattacataagtggttaacacacaaactgtgaatgcagtgtaaacaatattaaatgattgatgaggagacttaggtagaagtattagcttgcatttgatgacctttaagggcacttaaaaaaaaatgaagacatgaattctagtgagattaaaatctaaaaatacatatatatatatgtatgtataaatacatacatatttatacatgtataaatacgtatttatacatatatgtataaatacatatacatatatgtataaatacatatacatatttatacatatatgtataaatacatacatatttatacatatatgtataaatacatacatatttatacatatatgtataaatacatacatatttatacatatatatgtataaatacatacatatttatacatataaacatatatttctgctctagctttcccagattaatgctagttaaattagaatggtgtatggaaaggtgtgtttccctctgtttttttttttttttttttttttttttttcccatttcctagagctggaataaaatatccatgttttatgggacttgagcttggctttgtcccttggttttgttaatgttaattcctcttaaatatctaaaaacatctctacctatttgagagggccatatgctacacaggcttcctaatactgcttagcaatccttctactggttcctaagtggtttactattgtgttccctggaagaggtattacaaacgttttattcttctcaagcctcttagaactgtcaaagttgactgtgcctcctatttcatagagaaaaaactaaattattagatatgaccattcccaaaacttcttcccatctaccttcaagacttacctcttttcagccatgcatcccccttttctaagacatgcttctctttgtgttcttgacctcattccttcccatctaagaccatattccaccctgtttaatttctagtcttcggtttctctttttacagtgagcaaattagaagaataggttagaagaatagggtagtagatactgtagtttctttcctccacctctacatagctgcaggtcttctctgtcttaaatcaacaataacaaaacaagacaaaaacctttccttaacttggcctcttcccttgaactattttttctctctccttcctataattgttatacttctttaaaaagtaattgttactttttgacaaaagtaaatattgtcccttttttccctactttcaagtcctctctgtcttgtgacattctggcctccatacctgcttaattttttttgagatggggtcttgctctgttgcccaggctggagtgcagtggcacaaacacagctcactgcaacctccacctcccaggatcaagcaatcctcccatctcaccctcccaagtagctgggactataggcacccgccaccatgcctaattttttgtatttttggtagtgacagggtttcaccatgttgtccaggctggtctcgaactcctgagctcaagcatctgtccgactcagcctaccacagtgttgggattacaggcgtgagccaccgcacccagcccctacttgaatttttatgtcattattgactcttcaccactctctccttgagactcacttatccctttgctctctatttttcctgcttttgttattcttcatttttcttctcttgctctgaatcccttaaatgctgaggctgctcaagtttcatccctagtcctattttctcattctatatgcacactcatttttcatttaacagacttcactggcttcaggcaccatttgttttattattcatattttcaacccccatatctctctagtgctgtagacctttatttctacttactagttatattcacctaacatcccatagatatgccaatgtcaatgtgcctaaaacaaaattgtctctacctcccgctccttcaaatctattctgtcttctctaatcctataattactctccctcaagtcatcatcatcacttttctgggttactgtaatagccttcaggctaatttgctcactgtcaatcttgctgtctctcatttcagaatatgttctgcttgcaggtgacagtaaactagttaaacaaatatttaatattagcttaagc

SEQ ID NO: 16959 - DNA, 1532 bp, Homo sapiens
taagatcaatataaagaaagaagctatttaggagatatgatatgctacttgggagaaaactctcactaactgtctcaccgggtttcaaagcttgatactaaaccatgactttacattctttgtattaaagatcttaaaatatttgaattcacaggggatcccatagccctttgaaaattacttaaagaatttaagaagcactatagaatggttacagaaaaacttcttaagtatctgtgtaatagtattatatgcatacttaaactacagaggggaaaagcaaagacaaatactttatttggctgattatgttagatacaaatgtttctgagaagagaatacataattgagtttagtgatgctttgctatagcaagcaaacccacttttatgcaattttagaaatggggcagggaaacaaaatgtggtcattcatcagtcacttagtcattgagccttttatattgtacctggaaattaaattccagcaatgacaaaagttttgtgtattcattaaaagaaaactaactggaaaacaggttagattaattcagtactattaaaaaagaattcagagctgttaatattttatcacaggataggatacttaaaatatagcattctgtgctgagatctaaggtgaagtctataaagattaaagttcccttttttctgatgttcaagttgattgttgttcagtatggcatatatgacaaaagtatatttgagtcaaatgtggctttctaaaatggatgcaacattagcgttgcaaacaaaatcagcactatatttcttaatgatctaaagattaatttgagagaacacagttttcttaaatattataatgtctagagtttttttaggacagtcttagcaagtatgattgttctagtcttacttgctctaatgtttaaaggtgcaattttatgccattattgaaattgatttttaaaatctatataccatatgattaacatgcattttcaatatgaggcagtgtttatgcagtatttaacagagcaatctgctgccaatagagtttggaggtggatatttagtttacagtgtataaacttaaaatatgcatccctttaacaacgctttgtgttagcatgctgcaaatcaaaatggcacttaatattaaaagctggtttagggaaattttatgaaaatcctgttcataaatgtaatgcatatgatatgtacttttaagttttagttgcttcatgtttacattcagctgttcaacataattaaaatgtaattttacttcatgctatattgtggctttgtgtttcaaataatgttcacctttctgtttttgcaccagataagaatcagttccttgagaataaattttttatctttcttaacttcagaatattaaatttggaatatctactaaaattgtgtgttatgtggctgtaaatgatgtacacgctgtaaaataagatcgctactgttatgtgggattattatttctaaatgttactcattgaaatgagcatacaataaaaagcatttattgcactt

SEQ ID NO: 16960 - DNA, 429 bp, Homo sapiens
aaggtcctcgctggctttacataaatgaagatgcttgtgattccagtttatctctgaaactattcaacatggagttatttcagttttgtttatcagcaaagctttgtttactgaaggagctatttaatctatgttacattaaaaaagaaacgcgtgtacattttaaaagcaatgatgtaaactttgttcttgcattagactgaccagtttaaaaatatgaactaaaacctaatggctaaagtaacttgaccatatttgatgcttttctatgctcatttcaacttggctttttgtcttttaaatttttaaaaaatgcagtagtgtgttagagactagaaagttatatgtatggtttccctgttctactatacataacgttaaagtacaccttctttgttaaaaatgtacttgctaaacttcagcgtaaat

SEQ ID NO: 16961 - DNA, 3516 bp, Homo sapiens
agctatctatctttatcaaatggaatgaaactagataatttcaagaaactgagtaggacaaagggagaaagaaatacatgttctttttcctgcaattaataatcagactggaaaattgttgtatcattttaatttgtagttacaattgctttcattcgtgaagccgaaacgtttttaaacatgaattacatatgaattattaagcatatgtgctttcgcagctgataatataaaaggaaatcccacagtctagatatagccccattactacaaaatgctaaaatatttaatgaaaattgatggtggccacagtgtgcaggttataaaagcattaatacatttcaaggtaagagccttaaaagttaaaaacattttcagtttttttttaaaaaacgtactcttattatctggaacatagaaatataaaaggtaacatctaaagcttagaatagtgtgatttttagtaagccattattctcctattcaaataatatcccaaagagctaaacaattccttacatttaccaagaggaaagcttttactgtgttgaagctaaaaaaataatggctctttgacaaaacttgttatgttgatcgcggtatgtcaaaatttttacaggtttgctcatctgccagagcacacatataaatttggtatttcttaacatattatcttgttagatttgttaccagtaaaatattactgtaatttcatatacacagtctatacaatgaaataatgaatatttatcatattgatacaaactgtgacctcagcttcagagtgtcagggcctcacttgtatagaatgtaatgttctcctcaaacatttatgttaactctataaacaaatatcgttaagttaaacaagttttcaaaaacaaaacaatttttaaagtaccttaaaattgaggatgttactcagtgttaacacatgggaacaccaaaatattcaataagcctggtcaattctatagttatcttttttgtaccaacacatgcttttctgttactgttatattatccagtagaaaatgttaggatatgtgtgctatataaaaaaaaaaaaagacttgttaagttttaaaataacaaaaatggctagttgaatagtattttatgtgtaattcttccatttattctgtttaattatacaactaagatgaaatattgaaaaaccctttgtgaaagtaacttttcaagtaaatgcacaactttagaatttctacaaataagttcttttaaacagtctttttattgtggattgtgaaatcaaaatctggagaaatgcttataaaatatactactagcttttaagttttaagaaagaagaacgtaagttgtacaaagatatttgtactttgacaaactgaatttaaataaactttatttcctctcactatagtgtggctttagaatatatcaagtacaacctgaatggactttttgattttacatttcctatatcactaaaatacttaaacacaaaaataaaattccactcctttatttcttcttacacctgccattgtctctaattctaaagagagagctatagatttctgcagttctagaggtgaagatagagacatagagaggctgtgaaacacacatacagccctgttaggtcttttgaattcacaccttattgaaatcagtgtagaagtagagttacctaaacctttatcgccaatgcacagcttggcctgttaagttaaatgtgggtgtcaaccagtggaaaagatcaaaggaccttttgcagcctagcttgccaatcttccagtaacaacgaggtgctaccaataggcagactgtgtctagagtcatgcatggacaagaggaaagtgaaagttgaatactctcttctcaatggcatagctggacttgattaagtattgactcatagaagagacatgtatgtttcccggggctaccccttcatagctgcatttaaaaatggtgttcaggccactatggctgctgtggtttgaatatttttttccctcgaaaactcatgttgaaacttaactcctaatgtagcagtactgagaggcagggcccttaagaggtgattgggccatgaggtctgtgccctcctgaatggattaatccattcatggattaatggattattatgagtgggggactggtgactttatatgaaaaggaaggaagagtgacctaagctagcatgctcagggtgcaccgtatgtcccctggtcatgtgatgctatgtgttaccttgggacttacctgacagctcttaccaacaagaaggccatcccagatatggcctctcaacctcagacttctcagcctgcctaactgtaagaaattaattctttttctttataaattacccaggttctgttttaagcctcagaaaatgaactaagacaatgccctagatgagctgccaaaatctgagcagatatgagccatcagaatagagacctgcagaggcccagggcactcaaacataactgtgcttgtctcagtcaaacttaattgggaaaaggaggagtaagagcaggccctttctgacatgctttagcagagataacttatcagggctagtttaaacaaatgtgtataggaaaggatgttatttatatattcttacaagagtgtaagggctcacacatttactgtactcagatctgaaagacaatgttgcttcttgatttttttctataatcactatgaccgtgttcacgattccctactctgcaactctcagcatgcatcatgatgattctctaacactgtctgtcaccttcctgtatttccacagagcatgcaagaacttctacaaaacttctataccacacagaagctgaaagagactctggggcactaaattcagatcctttctccacacagcaatgacatttatcaatctgactcaggtgtggctgttgcccctttttgatatggagggaacactgaaagacagtttccttctggagttccaaatgcaatatagaaaaaaaaaccctgtgactctggattttattttaagttctctaacaagactcctaccttgagatcttagtctaggtaaagaaaaaaaaaaaaaggtcatgaaacacaaatgtcctcaactgtcatcattctatgtttactttctcccaatcacatcacctgaggtagaagagatttttcagttgctatttctcttcgtaatgaattttctttacatcctgtccacactgctggagatactaagtcccaacctaaatgatggaaggagcatctcccctcttgtctgtggaagatatcacatgaactacctaattttcaagcatggatctccatatttcaaaggaaagttttaaaaatgtttttaaaacttcaaatatctcaccacagtgaattatgggtaaggtgataatatgtttaattagcttgatttaatcatcccacactgtatacatatgccaaaatatcattttgtatgccataatatatatgatttatgaattatagtaatattaataaaagtgttaaagcttt

SEQ ID NO: 16962 - DNA, 464 bp, Homo sapiens
attaaattggggtaaattcattttaaaatataacttctaaaattcataatttgactactaaagtaagacaaaattgcatgaacataaattttagtattattagagggagtagcagaaaggaacacaaactaatagtacctctcagtaagaaatacctatggggagtgaggaaacatctgtttatactttgcttttacaagtacatcattgaaatatcagacctgtcatctatattgagtcagcatttgaaccaagtaaatgttttcactgtcttaacatctatttctgtagatgtaaatattgttaacataaaagaatccaagttaacaggatcctgactaagatagcaaacatatattggaaggccagacaaagttctaccaagtgtttccagagattctgctacatgtattatctgaaatgttctccatatattcaataaaaaccaatttgaagacatagaa

SEQ ID NO: 16963 - DNA, 70 bp, Homo sapiens
ttgatgatgttccaaaaacccaagtagtcagtcccttatgtactgtggtaaacctgtttatgttcacccc

SEQ ID NO: 16964 - DNA, 1857 bp, Homo sapiens
gaataagaatgctcagtttgtttcagccttagttggtgcctccttagtttgggctcctttgtgataaggggttattttatgctaattcacaagtttttttttgaagtgaattcttttgaaaaaaaaatgcaaaactagaaaactttattcattttagaatagaacataatttctaactgtaaaattgtcattttgtactttttttgatgtaatatccttagaaatctgtagaataaagtgtattcctccacttttttttcctgaacagtcaaggtgaggcaattgattgagtatatttcccttcttatttcagtaatactctattttttttcatgaaaatgtcaacatggttcttctgaatctatcacagtgaaaagttctaacttgtttttgagaagtcagtacagcaggggaaaacatatgtgatgcaattaacatctgcataatttcacttaaaattattatgcaaaaatgaatgttttttcaaaaaatgtgaaatgtattttattttctttatttgtattcttgtttcattttttaatatgttgtgaacatgctacagatttgatagtacttttgactaaatgttgggagtggtcgtattaacttcttgcccaaagaagtaagcatattggtgttttctcaattagtcactgagaaaattaacactttaggcagtggctatttaaagtaggaattgcatcttaaaaacctttcctaagagatttggtatgtgaggatactttcagtaccactcctaccattcatttttctaaattccttagtacatatacttggatcatgttaaattaacaagaaagatgaataactgcgctgaattgcctttacctataaataatttaatattttaccttcgggttttatcaactgtcaatataaaaggcagtactccacagaatgatgttgaaaaacttcttcgaagaacaccttctattaaacttgttatctcttgtaaattattgtgtgtgtccttttgataatattcacaggtgtttcaaaggtaaggaataggttgtctcttggattaagtcatatgcctccagccattatatgagaactgtgaaaccaatatggttttctttatgtcttggctgcttgaaaattaaaaaaaaaaaaggtttgttcaatattgccgttacatttattagcctgtaatttctaaattggagattctctacatttcacttgcagtttcctgttctcctcattgcctgccttccattcatattacacttatttttctattttttgtattacctttttaaaaatatataccagttcaagtccttttaggaagaagaaaatacctaatttatgtaaaatttaaataattacttttttataatatgattcacttatgccacagattcaacattagaatatgttttatctctactgtcagttttattaccttatatacaaatcttcattttcatacatagtacaatgtaaatatataactttgttaacacttttgttagctctttgaccataaaataatgacaataagctgtttctatgtatttgtttatctacaaattacaggtttatccatttgcaaatattttcaaaatggaaatcactgtttatattgattataaacataagacatgctcattgtaaaaaatgtacacaaggcagaaggaagtaaaatttccacagttcagaaataccacaattaatattttcaatgtgtaaatatcttttcataatttttcctacgtatacacaaacattttgaccaaaaatccacactatatgtactgttctgtatttttaattttaaactgaacaataatcatcttttcctgacaataaatatcaatctctatcatc

SEQ ID NO: 16965 - DNA, 1056 bp, Homo sapiens
ctttctaggaacaacaaaattccattccccttccaaaaaatttcaatgattgtgatttcaaaattaggctaagatcattaattttgtaatctagatttcccattataaaagcaagcaaaaatcatcttaaaaatgatgtcctagtgaaccttgtgctttctttagctgtaatctggcaatggaaatttaaaatttatggaagagacagtgcagcacaataacagagtactctcatgctgtttctctgtttgctctgaatcaacagccatgatgtaatataaggctgtcttggtgtatacacttatggttaatatatcagtcatgaaacatgcaattacttgccctgtctgattgttgaataattaaaacattatctccaggagtttggaagtgagctgaactagccaaactactctctgaaaggtatccagggcaagagacatttttaagaccccaaacaaacaaaaaacaaaaccaaaacactctggttcagtgttttgaaaatattcactaacataatattgctgagaaaatcatttttattacccaccactctgcttaaaagttgagtgggccgggcgcggtggctcacgcctgtaatcccagcactttgggaggccgaggcgggtggatcacgaggtcaggagattgagaccatcctggctaacacggtgaaaccccatctccactaaaaatacaaaaaattagcctggcgtggtggcgggcgcctgtagtcccagctactcgggaggctgaggcaggagaatagcgtgaacccgggaggcggagcttgcagtgagccgagatggcgccactgcactccagcctgggtgacagagcaagactctgtctcaaaaagaaaaaaatgttcaatgatagaaaataattttactaggtttttatgttgattgtactcatgctgttccactccttttaattattaaaaagttatttttggctgggtgtggtggctcacacctgtaatcccagcactttgggaggccgaggtgggtggatcacctgaggtcaggagttcaagaccagtctggccaacat

SEQ ID NO: 16966 - DNA, 692 bp, Homo sapiens
ctatttttttattattattttcagttgatgtagaactttacaaaatctattgacttcaaagagggatcaaaacaatcatattctacagatgtacccaatagatatatggattcaattaagtttggtagaagatgagaacaaaataactactgatttaggaaaattggatgcagaataataattatagtaggggcaattttgtctgtagatggcagtatgacaattcttgctagagaatatattgaaaaaaacttcaacacaaagggttgtagcactgtcctcagtaccattgtgtgcatgaggatcagaatagtctgggctagatacatcacattaaagcttttcagaatctgataaatagctctaaatactaatgatattgagaagcctagcttcacttgggaaaatctgtggctgttcacagaaattcagcaccaagttattccccccatactctaccaggccttcaggtcctcataaagaaaagtgtcgttttcagattaggaactcaaaattattttggtgcatcaaatctacagtcacacaatataacaagaatgggattagaaaaatgaaagcctactcattctcatctttaagccagagaatgaaatatatatgaggtctctggatagctatttaaatatttgcatatttatgcaaggtattttgagcccttcagaagacattct

SEQ ID NO: 16967 - DNA, 4287 bp, Homo sapiens
agctaaaatagttacttcaaattttcagaaaagatgtatatagtcaaaatttaagatacaattccaatgagtattctgattatcagatttgtaaataactatgtaaatagaaacagataccagaataaatctacagctagacccttagtcaatagttaaccaaaaaattgcaatttgtttaattcagaatgtgtatttaaaaagaaaaggaatttaacaatttgcatccccttgtacagtaaggcttatcatgacagagcgcactatttctgatgtacagtattttttgttgtttttatcatcatgtgcaatattactgatttgtttccatgctgattgtgtggaaccagtatgtagcaaatggaaagcctagaaatatcttattttctaagtttacctttagtttacctaaacttttgttcagataacgttaaaaggtatacgtactctagcctttttttgggctttctttttgatttttgtttgttgttttcagtttttttgttgttgttagtgagtctcccttcaaaatacgcagtaggtagtgtaaatactgcttgtttgtgtctctctgctgtcatgttttctaccttattccaatactatattgttgataaaatttgtatatacattttcaataaagaatatgtataaactgtacagatctagatctacaacctatttctctactctttagtagagttcgagacacagaagtgcaataactgccctaattaagcaactatttgttaaaaagggcctctttttactttaatagtttagtgtaaagtacatcagaaataaagctgtatctgccattttaagcctgtagtccattattacttgggtctttacttctgggaatttgtatgtaacagcctagaaaattaaaaggaggtggatgcatccaaagcacgagtcacttaaaatatcgacggtaaactactattttgtagagaaactcaggaagatttaaatgttgatttgacagctcaataggctgttaccaaagggtgttcagtaaaaataacaaatacatgtaactgtagataaaaccatatactaaatctataagactaagggatttttgttattctagctcaacttactgaagaaaaccactaataacaacaagaatatcaggaaggaacttttcaagaaatgtaattataaatctacatcaaacagaattttaaggaaaaatgcagagggagaaataaggcacatgactgcttcttgcagtcaacaagaaataccaataacacacacagaacaaaaaccatcaaaatctcatatatgaaataaaatatattcttctaagcaaagaaacagtactattcatagaaaacattagttttcttctgttgtctgttatttccttcttgtatcctcttaactggccattatcttgtatgtgcacattttataaatgtacagaaacatcaccaacttaattttcttccatagcaaaactgagaaaataccttgtttcagtataacactaaaccaagagacaattgatgtttaatgggggcggttggggtgggggggggagtcaatatctcctattgattaacttagacatagattttgtaatgtataacttgatatttaatttatgattaaactgtgtgtaaattttgtaacataaactgtggtaattgcataatttcattggtgaggatttccactgaatattgagaaagtttcttttcatgtgcccagcaggttaagtagcgttttcagaatatacattattcccatccattgtaaagttccttaagtcatatttgactgggcgtgcagaataacttcttaacttttaactatcagagtttgattaataaaattaattaatgttttttctccttcgtgttgttaatgttccaagggatttggagcatactggttttccaggtgcatgtgaatcccgaaggactgatgatatttgaatgtttattaaattattatcatacaaatgtgttgatattgtggctattgttgatgttgaaaattttaaacttggggaagattaagaaaagaaccaatagtgacaaaaatcagtgcttccagtagattttagaacattctttgcctcaaaaaacctgcaaagatgatgtgagattttttcttgtgttttaattattttcacattttctctctgcaaaactttagttttctgatgatctacacacacacacacacacacacgtgcacacacacacacatttaaatgatataaaaagaagaggttgaaagattattaaataacttatcaggcatctcaatggttactatctatgttagtgaaaatcaaataggactcaaagttggatatttgggatttttcttctgacagtataatttattgagttactagggaggttcttaaatcctcatatctggaaacttgtgacgttttgacacctttcctatagatgatataggaatgaaccaatacgcttttattaccctttctaactctgattttataatcagacttagattgtgtttagaatattaaatgactgggcaccctcttcttggtttttaccagagaggctttgaatggaagcaggctgagagtagccaaagaggcaaggggtattagcccagttattctcccctatgccttccttctctttctaagcgtccactaggtctggccttggaaacctgttacttctagggcttcagatctgatgatatctttttcatcacattacaagttatttctctgactgaatagacagtggtataggttgacacagcacacaagtggctattgtgatgtatgatgtatgtagtcctacaactgcaaaacgtcttactgaaccaacaatcaaaaaatggttctgttttaaaaaggattttgtttgatttgaaattaaaacttcaagctgaatgacttatatgagaataatacgttcaatcaaagtagttattctattttgtgtccatattccattagattgtgattattaattttctagctatggtattactatatcacacttgtgagtatgtattcaaatactaagtatcttatatgctacgtgcatacacattcttttcttaaactttacctgtgttttaactaatattgtgtcagtgtattaaaaattagcttttacatatgatatctacaatgtaataaatttagagagtaattttgtgtattcttatttacttaacattttacttttaattatgtaaatttggttagaaaataataataaatggttagtgctattgtgtaatggtagcagttacaaagagcctctgccttcccaaactaatatttatcacacatggtcattaaatgggaaaaaaatagactaaacaaatcacaaattgttcagttcttaaaatgtaattatgtcacacacacaaaaaatccttttcaatcctgagaaaattaaaggcgttttactcacatggctatttcaacattagttttttttgtttgtttctttttcatggtattactgaaggtgtgtatactccctaatacacatttatgaaaatctacttgtttaggcttttatttatactcttctgatttatattttttattataattattatttcttatctttcttcttttatattttttggaaaccaaatttatagttagtttaggtaaactttttattatgaccattagaaactattttgaatgcttccaactggctcaattggccgggaaaacatgggagcaagagaagctgaaatatatttctgcaagaacctttctatattatgtgccaattaccacaccagatcaattttatgcagaggccttaaaatattctttcacagtagctttcttacactaaccgtcatgtgcttttagtaaatatgatttttaaaagcagttcaagttgacaacagcagaaacagtaacaaaaaaatctgctcagaaaaatgtatgtgcacaaataaaaaaaattaatggcaattgtttagtgattgtaagtgatactttttaaagagtaaactgtgtgaaatttatactatccctgcttaaaatattaagatttttatgaaatatgtatttatgtttgtattgtgggaagattcctcctctgtgatatcatacagcatctgaaagtgaacagtatcccaaagcagttccaaccatgctttggaagtaagaaggttgactattgtatggccaaggatggcagtatgtaatccagaagcaaacttgtattaattgttctatttcaggttctgtattgcatgttttcttattaatatatattaataaaagttatgagaaat

SEQ ID NO: 16968 - DNA, 2096 bp, Homo sapiens
catcaagaaaaaaagcaagaatgagtttgccgagttcccctgtgttagtagaattatttctggactttgagttgcctatcaaatcccactgtgccagtaaggggcatagtggctgctggcaacttcaatatacatttttgtttgtttgcttgtccttccttctaatggttaattcctctgagagctaaaattctgttgtcataccagtgaataaaatgtttgaaattaaagtaaaatgtgttagataatgaataactttgacaaaaaaaagtgtatctaaggttaaatgtatctaattcgaatacatctttgaaatatcaccatcaatgaaacataaatgtaatttccagacaattgtagttggtatttttgatgcaaggacttaatattgatgtctcaaattccttgcttttgtaaataagtttagttcattttccttttttctttaatgaatctttgtttacatggggaaagagcatgtggggtgggaagggcaagtgtttgctaatcactgtggctagctgaatagtgtgcctttgactcttacacatcctatttttgccagagcagcagccgtccttttcttactttatgaaattctggggtgttgtatgctgcttcaagtgaacaagaaggacaggagtttacagcataagtaagcccccatatctatgaaatttacctcttcttcagcactgtttactatacagtactgaataatatttagtattacaatattacatgatttgaaataactttatacccattttgtatgggaaccattctaaacagaccctgatgttgtttgattaagaaatattctgaaattttttttgcatgttttatactgttaagttttaattatctgaccatattctatataactgatgatccttttttaagatatgatttatgcttaggatataagtttcaagtttttagtttcttagccttgctatattaatttcattactgtgtttaattgcacccttgccaaaatatttagcatgtgaaaaggttttttttaaaaaatatgtaatgccttcatattgaagctggttactgtacgcaagttgagtgccagacctctagtacgccgtatgttacatgaaactactgccaaaatcttagtaagattgttgttgaaaagattgttgtcttaagcattaatattgaatttatatagaagttaaatgtagatgataatgacatcattgatcttcctgtgtccgtattttcctacaatttggtgccttgtatctgttgctgattcacttttaccactagtgtaaaaataagtgaaaaaatatttttactttacatttttatatatcagagtaacataaattataaatttgtgtctcaaaaccacctgtgatggaggatgtgctaattgtaatgtcataggtacaaagtattttggcatgatgaaaagctcaatagctattgtttttcaatagcagattttatctcggctaccttcaatcacaagtaaaattataaagataaaaaacatctacataaacatgttggctgccaaattttttgcattggaaatactggaatctctcattaaagttcttggaacattatagtgatgccatgttagattaccttggagcttcataactttagctttttcctaaaaatatatgtttatgctgataaaaactattacatttatgggatattttgtatccatatagagtttttcagaattgttcattaaaatgctttttataagcttatattatttgtagaatatggcaaaagcatttacagctcatcatgtatctatctgctcctgttcacttccaaacctcttgtagttaggcaatgccatttgactacttcaagcagagggattgtaaacagaagtgattttctatttccatgttggactgtaaaaagttctgcatgaccctccagttttcttttgcctgtcatggtgacctgaaagcaagatgttccaaatggcatacttacaagacggatgcaacctgggtccttaggtcgctgtttagaagggacctgactggagtgctgatggacttgcagtaaactttttaagtgtaagaaataaactgttatgtgtt

SEQ ID NO: 16969 - DNA, 5677 bp, Homo sapiens
ttcctgatgccaaagaatatgaaaatatttaagtaaaaacaaaatgatgcattttgagaagaacaaagtgtgcactcagcggctggaaaggaaataagtgcatttctgcaaagatcaagataagctggatgaagtagtgtgcatttgtaatactattgcaagactcctcccacaattattctaatctgaacacagttatcaggattacaaaatgtgttccattttagtgtaaagatgtgtatcatttgtaattgtgtgtgacctgactgtgatgatggaagtgtaagaaattgaagagttctaaggctttcaaaaacactcagtcaaaaatttaaaatcttaaatgtgtaagtcacccccaccaaaaacaaaagagaagaaaaagaatagaaagaattatccagtgtcagcttccaatccctagtacatatataatagaaaagggccaagaaaaatatgcatcttgatttggagagaggctaatattatgcacactgtaagagaagccattttggaaattcacgaaagtactgctccaccccagttgagttatttagaattttatctcaagtgaaagctgatggattcatctgctttggctgaaattaaacttatcattagtctagctagcatttcagcatgatattgcaagcacttctcattgctaaaaataaataaaccaaagtttaaccgaatcagttagggaaagtgatttaaactttatttaaagaggtattttctaattatgcacagatatctactttatacaaatactttatatggctatttttgagaaaaccctcacattttaatgtttatgctagggatgaacctgaaaattctattacgtttatttagatttcaaaggcaaatattgattcctatgctctgtggtttatttcttttttctattgcttctttctcccttgagtcccttgaaggcagggaatagacttctagaaaacctgagaggaaaaagaattctttttacaggaggcagcagaaaactgtctgaaaggtcaattgttttatctccctttccactctctttccaatttcactttggtggtctgaagaagaaaaagaaattttatgtatgtatgtgtaaatatgtgtatatatttctatctcttgctacaataattccaactaagtgaacttctcaattatcatcatacttacttaccttatattaacaaattaagatgatgctgccaaaacaagtctagcagggaaaacaggttctacatttttcttaaataaattagggagtaaaagttatacttaacttgtctgtctattattttaaaatatgcattgaaataatgtggtataacttctctggagtgcaattttaagtctaattcatgcagatgattgattgtgattattgtaagaaatttcttacatgtatatttcttatgtagaaaatactgtttctactcattcaaagcacattgtagatattcagagagaagaacaaatggctggcttggcaaatccccatctgagataaagtaaacaagtgaccagcagcccacagatgattcctttatatagatgtataatgattcaaactgctgcctttgcctccagtgcatccttacttaggtattatacttctttaaaaagctctgaagctgctacaatagaaaaatcaaaaagggtaacagtatctgaaatttcacagtcctatccgatctgaaaacacacatacacaaatgcacacacatgcacacacacatttaagggacatagcagtaacactgttttttaacaacaacaaaagtttaggttctaatttatgtaaatacctagtatgtgtatttttgactttacaaagtctttcttttctgaaatcttcgtggtatggcttttttaattcttttgacagcttatcagtctgtaggagaatgatcttgaaatgttaaccctgactaaaatttgggagcatatgccttgctatattatcaagctggtcaaggtagaaatactgatatgtatcatcaccttttccagatacaaacttgccttattttctagtttgtgaacaagaacgaatgaagtactattattgataacttatatatttttatttagagcaatcccacatgcttttcacaaacattaaaaaaaaaaacctttcagggtctttcatgaagttccaatagttgagtgagttaaaaggtttgtttcccagatttgtaatggtcctgctctagccatttgcagttttgttttagatgattggaaagtatatcaccaaaaaaagtatatagtgacatttttagtatgaaaccaaattacactaaggtcttttgttggccatattactgccacacatgagaagcaccatttatgcagattttcttcagaatatttttaaaaggtacagaatccttaaaatattaacaactaattgcatccatcatctcctttggctgctgtaacaaattaccaccaataatatgatggcttaacacaacagaaacttatttgcttacatttttgaagggcagcaaagccatgctccctccagaggctctagaggagaatctttccttgccacgtccaccttttggtggctattggcattttttggcttatggccacatttctctttctgctgtgtcttcacatcaccctcctctgtatacctaatctgcctctgcctctgtttaataaggatccttatgatgacttttagggactacccagattactccaggataatctcctcacctcatgagtcttaacttaattacatctgcaaggcccccttctccaaataagataaattcatggttttggggattaggatgtggctatgtcttttaggaagccactcttagcccaccagagtctgccctttggcccaaaatttatgtctgtctcatgtgtaaaagacattcatcccatcctaacattaccaaaagtctcaacccattatatcaatcctaagtccaaaatttcattcaaatatcatcggttcaaaagttccaaagcttatcatttagatcatctaaatcaggtatgagtgaaactctgggtatggtctttcctgaggccaaattcctcttcctctgagaaccagtgaaacagaaaagttaatctgctttcaaattacaatggtgggaacaggcataggataacagttacagacatttctgtctcaaaaaggagagaatggaaattggaatggagtctcctgtcccaatcattttcaaaatctagccaggcaaatttctgttatatttcaaggcctggcagtaatcctctttctcagggctccaccctttgggcctgtagctcttctttcttggactatggattgggcctctgcctctgtgcctatgggttgcacttcttcctctgttcccacacttgggcctctgcctctgtacctgcagctctgctctcgggatggtgcttcctttatcttgaagggtggcacatgtttgcagctgagaagttttatcaacgggtttcctacctgtagaattctggcagtctcacaatcttctttcatttttttctgtctctgtcccttttaggcccagttggaagtgtttctgatggtagaacattctcaaaaatcttgtgggtcttctacgtatgtcacattgattcacacattcagaaaagagggtcctcacagatttttcctgaacaaccccatctctattcttggcttctgttgaaacagtcaaataaatccacaagttaatgcctaacctcttcagcactagccaaaggttgtcaagacacacccttgggcttatctacagagcacacttttctaacagtgaatctcctaattttagcatctttttttttttttacaatcattcagattgtgaattcaggctcagaatttacccagtcatcagatactgattccttttgtccacttatatagttattttctctttaaaaaaaaattttttttaatgtattagagatgaggtctcactctgtcacccaggctgcagtgtagtggtgcaaacatagctccctgtaacctcaaactcccaggctcaagggatcctcctgcatcagccttccaagtagctgggtctacaggtgcatgccaccatgcctggctaattttttgcatttttttgtagagacttgatcttgctatgttgtccaggctgctctcgaactcctagcctcaagcaatccacccatcttggcctcctaaagtgccggattacaggtgtaagccaccatgcccagcctgttttgtcaatgtatctgttttctgtcttattttactataagcactaagaagaaactaagctatatctctaacactagacttgaaaatttcctcagctaaacatccaagttcatcatttattcaacttttcacactactgtagtagacaatttagatagataaactttttgccactatatgacaaggattccctttcttccattttccaataaaatcttcatttccttctaaaccatcactagaaatgcctttaacattcatactactaccatctggtaaaggcaatctagttttttctatcacagccaccaaaattcttctagtctctacccattatccaattccaaagcctttttcacattttaagacatttgttacagaagtacccaatccgtcccagttccacaatctgcattagattcccatggctgctgtaacaaattaccctctagcccagtggcttaaaacaatagaaatttattatcttgttgttttggaggccaaaagtccaaaattgaggggttggcagggctgaacgtcttctggagactctaagggaaacactcttcccgtgtcttccagtttcttgtggctgccatcattccttggtttgtgactgcatctccctctcctctgtcttcacatcacttcccctctgtatatataatctacctctgcctctctcttataaggacacttgtgacgggacttagggcccatccagattacccatgataattcccttattccaagattcttaattatatctgaaaggaccttttttccaaataaggtactatcacaggttccagggagtaggatattgaatatcttttttggggagggggcaccatgcagctcactacactattcattgcacacaaatgaatttttcactttttaagatgcattcttggtgctcaaaccagatcgaagtttgtctctaaaagctattgtctgcacaggctgctgcatgctctgttgttaaatggatggacaggctattctaaattttggttgatacttttgctactatgggcaattaacttgaaaaaaataatcgatcccaactctgtgctctgatgtacctcttctgccccttttatgacacctttgaccaaatgccttctatggttcacagtgcaggcacaaaactacctctgatacagaagggttctttacaagcttattttacataccgtgaatccctcacctaaagggagaggtgaaagcaaagactgctttgaatgggtattgagggagattgtgtccataccaagccaccctgaagaagtatttcacttgcagtagaactgtggatttgtgctgtcatttcaccttggaataaacacctatctctaagcaggaccaagaatgacttgcaatctatatgtaatggctacttacttattcaataaagttaagatatacgtt

SEQ ID NO: 16970 - DNA, 92 bp, Homo sapiens
acggcctgagtgctgttttaaacaggattgggtgatggtacaacatgactttttaagataatcaagtagtaaaagtttctagtggaaacatg

SEQ ID NO: 16971 - DNA, 355 bp, Homo sapiens
ggcagggaaaacatcctttcatttttcgaagacccttgcatccagctgtgagtaattttgacctgttgactttttaggaagtaggactaaaaaaaaaaatctcaagtggcattctttgtcaactcgctgcttttctaactgctttgaacttttcggattttctgtatttgaagctcagagagagacggtgatggataaattgacaactctgtaggatttactagcaagctaatggaaacatgattttcggggaagaaaaactacagaaaatgtagaaatttattatttaattgtgttggagcttctttttccaaaagaaaaactagttgcagtcagggagccagcgaaaagacaa

SEQ ID NO: 16972 - DNA, 163 bp, Homo sapiens
taggaggtttgagctcaaatgcttaaactgctggcaacatataataaatgcatgctattcaatgaatttctgcctatgaggcatctggcccctggtagccagctctccagaattacttgtaggtaattcctctcttcatgttctaataaacttctacattatc

SEQ ID NO: 16973 - DNA, 312 bp, Homo sapiens
acttgagccagggcatggttaaagtcaagggaaaagctcctctagttagctgaaactgggacctaataaaaggaggaaatgttttcccacagttctagggacaggactctgaggtgggtgagtttgacaaatcctgcggtgtttccaggcatccttttaggactgtgtaatagtttccctagaagctaggtagggactgaggacaggccttgggcagtgggttgggggtagaagttcttcctttcctaacccgggcccctgcccagctctccaaagtctttcagaaaagtaaatcctaaattcagtgatgaa

SEQ ID NO: 16974 - DNA, 219 bp, Homo sapiens
gttttcaaaaatacctggcaagaaatctggaaattctataattttgttgaaatattgaaaaaagatgacctgcatcctaacccttgaatgactcaaatcagtgccaggtggaggactcccatcaccttctctcagaacaaaatcacttcattttattgtcttagtttgtatattttctgtgacttgaaataaactttgaacacaattttagtacactgc

SEQ ID NO: 16975 - DNA, 270 bp, Homo sapiens
ccatcaaatcaatcctatactcactgagaggctcaagaagagtgagatggcatccattgagaatgaagaccaccttggtaaaaaagaacagagactttacatctttgtaccgagatgctgctgacaaagcttgtggacaataagtcatgggtgatcaaccaaaactgagccttagaaatacagggttcatttagaaataagtatttttttctttaaggttcttaggcagaaaaggattggcaaaaataaatagaacttctttgctgagaa

SEQ ID NO: 16976 - DNA, 1408 bp, Homo sapiens
aaaagtggaagtgcaaagagtggaccttccaggcagttgcgtccatgacaccaggaagatgtcagtgtgtgtttttcatttgatttatttatcttggggaaagtgaaaaatgtaatctgcaagttaatgaccctattggcttgtgtacatctatatgctaaaatgacttccccacattgacatttgtgcgccacctttaatcactctggggcaactctcacatcttgctgcatgtacatgtatacggctactattgaagtgtaattgtgagatggactccaacaagcatgtgactgtgagattgtgtgtgggaaaatgtatttaactactctgtgtgtgtgtgtgtgtgtgtgtgcgcgcgcgcgcgcacgcgcacacactcacgcacacacaagcagagaaggcgctgatcttgaactaatcctgcacaggcatccttccctttatagattgattccagcaaaggcggaataaaacaaatttcctatgaagagaatcctgatatgaaacaagtcatgtagtctcatggccgggaatctctccacagatactaacaacttaaacttactactttaggagaaaaaaaaaaacattcaatttcggacactgagttatatatgaaattaattaggctctagtccaacagttgtttacattttaaatagtccatattgaatttaattaaaacaagggatgcatgcagtcaaattgatagtttaattcttcaagtgataatataggaagtttcaccttgcctttgtccaagccccacctattaaaaccctttactcacagtttgaaactgaagcagtaaacttgtttccagacatctttttcagattgtcttaagcccaaagttgcctcacttccactattctcagcagccaaccaggatttggcagctgctccactgttacggttgagggaacagggatcagtcctgttagaagtctgtgagcctcaaactctacctgttctctgcaatcatccaaaatttgaaaaagaagctatatccagtgtttcactgccaaacagattcactactcttactgattcttcactgagctttgctagtataagcagagttccaagtctcccctagggttgtctctacatttctttatcattccagtgggtagggtttagctgggggaaggacatttcataagggttagttggactgagcagtatggacatttgcttttttcattacgtactgttgtttttccttgttaggtgtgctttggtggttttaatattattgtgccagggatggggaaatggggggggttgtgtgggaagagtacttattattgtgttttcttcagtgtaattgttcttggtaattgatacctctctgttttatttctctcattctttcaaaataaaactttttgaaatttggagg

SEQ ID NO: 16977 - DNA, 20 bp, Homo sapiens
atgaatgttgacataaactg

SEQ ID NO: 16978 - DNA, 3875 bp, Homo sapiens
tggagccagatccccatcctatagttcatagtcctctcctggttccggtcaaagcctttcctcagccttcacccaacctttccagtttccactggccccacattcctcaactagtattatttgggctctgggcagcagcagggatctggtggtatgtgaggtgcatgcgggcagtgatgggagaaggggaggcatgattcttctgaccctagaaatgttccctttaatcttcaagttcgagatcagccctttaagtacctttctgttgcagcccaggcaaatatcacttggccattcagatggggagcagagaagctgccttgcagagctaagcggtacatgttggcccctcttccttctccgtggaattatggaaagagagaagcctaattaccccaaggttccatccagcattatgaatccacagggtttacccctactctctggcgcaactcagggaggcaaaagggtatccccgagacaccttccccaccccaagtgcccctgaaaaagtctgggcagtgtgtgttctattacttcagctccaggacagattgctagccatcctaatgctacctaggtattggtttctcctcaaatatcttcattttctttagcctcagtccctgacagaccttccttaaggggagaacagttcattctggttcttctacgttatatttggaagcattaaatccatacttatgggtttagattttttttttgccccacatcttcctatttcttaaagtcctcagcattttgagagacccactgagttgcgagttgctctggaaacctggctgaagccaccctttgctcctctgagtctgtcctcacagacctgaggacacagtggcagcttgctgagcaagggagtgttgctttccttgggtaaggaagaggaagcccacctcaagtctggagtagtatgactgccatccaacacccttccaggctgtgacccttctagctctcaggctgaatcaggtgaggtggctgattgtccccagctaatcataaggcatttgcaactggctaccgtgtgtagtggcccctccataggagccacaggccacaaatcaggaagctggccactttccacccagacaacaacagcaaggccttcctgtgcctaaaattgttatttctaactctggaaggtgaatccaatcctcaaactgaactagctcttcctaggcgacatataccatgatctctttatccagaaactgttcagaatagatagtaggggtgggggagtgggcttgggaatgttgaatagattcagagcccacttaggcagctttctcccaagaggagctttataacctagagccctgcagttgacttcatttgcctaagtttatatacatacatatctattctacatatctactgtacatcagtgctctcctggcctcactcacacattaaattctaatacctcttgaagtattaatgttctgccttgctctttgttagccccagcctctggttggaaagatagatgtatcctggctgttcccctaggatatctctctccattgatgtttggggtgggctgtcctcaagaccaaagcaacagaaacctgtggtcacagagaatctaacaggaagagtcactgttctcttcactcattccaaatcttgttcccttgagacctgggccttgggtgaattttcctgggctcccctaaatggttcaggtgccaaaatagagcaaacccaagctctgcccaccccatgcagaaaaggacaaacaggcctttattagcctttgccagctaagacacagagaacattctctggtcccttccagctcttatggtctcactcagggctaaagaaagcaacagttgccaccacaatcaggagggagtgacggttggggtgttgtattataatccagcagtgggccagtgggtagaactgctaggaacctagtttgatctgctgcaggggaggcagggcagtggcttgggtccagaagcttagggttgcctcctccaccactaagtcacaggtccagggtgtcagacttcacagcataacatctgccttagtgttcatgaggtctctgggcaggagaactgggtatctggatagatggttgagcaggtggtaggcgggcatcaatcatagaacctgggcatcagtcagagtgggagcatatttgtagaagcctagattgtgggcgggaatgtgggacggagggctcaaggactttggaggcatatgcctgcctaagccttaggcgggtacatgttatggagcaattttttaccaggaaagtcctggaaaatcttttctgttatccccaccccacctgagagctcttgggctgctgagggcctgtggcaactgcagtgggccaggcatggtagaaaagatgtagatcttgttatgtaggatttgcgttgtaggtggactgaagcagcaggtcaagagttgaattctcactaaggggtcactgacattttgtggtcctgtgtttaccttaatgcctaaggtgagtgtattgttcaagggtccagggacagtcactgcagtatgtgtggggaattttcccacagtaaggtaaatggatccttgggtactatgaatccaacttggggttggatttaccaaaatgtgttgtatgttgttagacatcttgttgtgtattagtcttctaaggatattgtgcatggcactgtgtagtttatagccctacactggaaggatggtgaagggagttgctagattgatagcctaaagaaaaccttctgactgtgggattagcatcaatgataaggaatgtgagcatttgctggggttgttgtcaaatagtatcagagaacagttaggactgagaggtgatttcttcttgacagaatttgatagaggccaaaaagccattacgaggatacctctgcttccagtgacagcagagtggattcacattgattgggcattgtcacggaaggctgactagctggaggacatcaggctgtgctatgcttccctagggaggacatgtgcccttccctccagattagaaaggctagaatcaagagtttcaagtgctcattttcttcaaggtccaaggttgggaactatttccctacagagaaatctgtttgagtttctggtgctccaggaaatgggttggcaggacacagaaatgagaaaccctgaggccaggaagaggccaatcctaggagatgttttccctccagattcattttaaggaatatctgtgcttcctgatgtgtgtgcttgagatttgggctctatatccagcatttgaactcacattctcagtggcagagtcatggtctgtggcaccatttcaaggccaaaaatcccatccaatttcccttcacatagatgacagaaaagcaagaaagtagctgccttaactcgaacagttctgggaaaaaaactgggggccttgtcctgaggctgtggagacttaattcttcagctgggtggttcccgtaggaacaaggaacactttagctacttcttactcttttaacaccaatggctgtgggagaaggaaaggctcaaggccagggctcagctcgcagagtccatcttctcccacagttgccacatttgagagggggcctgctgaatgcccttgctgtcccctatggcagtattgaggcctgaccgaagtctggtatgctgcttgctggctacaagaactggtcacaggatgaaaattggggaaaggatttgggggaggtgacaagggtggcatggaagtctaggggacaaagggacagggttgggaacaaattggttaactttgattgccactcactgtggtgctttccccctttcccttgaattctgctttgaaaagaataaatttgtacttgttt

SEQ ID NO: 16979 - DNA, 46 bp, Homo sapiens
gtgtcatcttttattatgaagacaataaaatcttgagtttatgttc

SEQ ID NO: 16980 - DNA, 789 bp, Homo sapiens
gtagagaaggagcactaaatagctactccagatataaaagctgtacatttgtgggagttgaatagaatgggagggatgtttagtatatccagtatgattggtaaatgggaaatataattgattctgatcactcttggtcagcttctctttctttatctttctttctccttttttaagaaaacgagttaagtttaacagttttgcattacaggcttgtgattcatgcttactgtaaagtggaagttgagattattttaaaacttcaagctcagtaattttgaacactgaaacattcatctaggacataataacaaagttcagtattgaccataactgttaaaacaatttttagctttcctcaagttagttatgttgtaggagtgtacctaagcagtaagcgtatttaggttaatgcagtttcacttatgttaaatgttgctcttataccacaaatacattgaaaacttcggatgcatgttgagaaacatgcctttctgtaaaactcaaatataggagctgtgtctacgattcaaagtgaaaacatttggcatgtttgttaattctagctttttggtttaatatcctgtaaggcacgtgagtgtacactttttttttttttaaggatacgggacaattttaagatgtaataccaatactttagaagtttggtcgtgtcgtttgtatgaaaatctgaggctttggtttaaatctttccttgtattgtgatttccatttagatgtattgtactaagtgaaacttgttaaataaatcttccttttaaaaactgg

SEQ ID NO: 16981 - DNA, 398 bp, Homo sapiens
tttggagtctgtcccaaacaatattgagatatttgcagttggtacgatgtgatttgtaaattctttgtttttcattgtgcgtatatggtaaagagatcttttcagctgctattttggaataatgactatcatatatcataacagtgactgatgttggttgtaatggttgggtttaggatgaaccattttaaggatgccaaatgaaatattagtatttgtacacagaaagaatttattgatttgatcttattacctagattgagattttttaatctttcctctacctaaactgacaatgaattggttatacatcatgcataagctacacttttatattagtttatatttgttattctaagacttgtgtttcatcaataaagttgtgttttaagcagcag

SEQ ID NO: 16982 - DNA, 1722 bp, Homo sapiens
caccttgattttgtaatttagaagcaacacacattgtaaactattcattttctccaccttgtttatatggtaaaggaatcctttcagctgccagttttgaataatgaatatcatattgtatcatcaatgctgatatttaactgagttggtctttaggtttaagatggataaatgaatatcactacttgttctgaaaacatgtttgttgctttttatctcgctgcctagattgaaatattttgctatttcttctgcataagtgacagtgaaccaattcatcatgagtaagctcccttctgtcattttcattgatttaatttgtgtatcatcaataaaattgtatgttaatgctggaaagaaaaaaagaagaaagaaagaaaccatccctgtccttcagtttataatctagttggagagataagaaacgtacaaaccaaaagataacagaatatctgaagcatgtactcattgtcagatgttccctctgagagcacagaggaggcaaaagcttctgtgggatgtgctagtcggctaaagcttcacagaggaggtggcaattgaaaatgagtcctgaatggggtagggtggttagggaattccatgagacaagacaaggggggcatggtgtgagaaaggcatggaagtaggaaccctcttcctatgacaggagatcattctgcttagagtggagagtgtggagagtgggagtagataattttggaaagctgggtgaagccagttgtggagaattgtttgaatattatcccattgaatacccagagccactaaatctttttttactagaaaataattggggtccatatgaaagtctctattactgagtagtgtcaatgagggtgtggcaaaatggagcctttcacatcctagtggtggccatttggtaatacagatataagccttaaactatgtaaacccttgtcctaaggaagtaattgaataattgcccaaagattgtatgtatgaggctgttcatcccagcactgtctaagctagtaaaaattggaaacaatttaagtatctagcacattggattggttataaagcaaggaatgttcacacagtaggatattataagtatgctgatggaaatctatattgccaggaaaagctattcattatgcgttgtgaagtcagaaagtaaaaaagggtagatagaagtattcgaagtatagttccattttttgagactaataaaacatatgtttaaaaggacactaaaaactggagttatagatatccagatagaaacagtagttatctttgggtagaagaataatgagtgatctttacttttttactttttattcatctttgtgtttttatttatctaaaatgggtattgatttttaggacggttttgaaaaagaaaagtgttgggaatgaagcaagtgattgattggaaaacatactgaatggaagaaatatttagattaaaaatgaggtaggttgaagtttcttctctgaaatgatagataaatggtgaagataaggcttattgtgaggattcagtgaggtaatatatgcaaagtacttacaatgttctggcacatagtaattaattaagaaaatcgagcacccttaattacctagaatgcagggttgttagttttttggttgacttttgttttgctggggcattctgccatgttttagtgtcatttaataaataatagtaacaataaaggttaacatttattaagt

SEQ ID NO: 16983 - DNA, 197 bp, Homo sapiens
tgtccctggcaggcatttgtcaggccatatgttttaaccttatggtaatactttgctttagtcgttcctcctgctaccagtagcgttttgacccacctgccagtgtttgcttgctctatgtttcagtagcagattttcacacatgtgcattgcagagacgtcatgattcgtggaaaaataaagcagcttataatatc

SEQ ID NO: 16984 - DNA, 203 bp, Homo sapiens
aaggagccctccgatgtcttctttgtcttcgttcacatcctctttgtttcctcttttcaccagcctaaggcctggctgaccaggaagccaacgttaacttgcaggccacgtgacataaccacccaaagagccagttgctctgtgtattcgccccactcatgatcaccattttattttcataataaagagtgacgttacacgtt

SEQ ID NO: 16985 - DNA, 337 bp, Homo sapiens
atacccctctgttctcataaagcctcaaacagttttttggagttgcaatatgaaaccaatgcatattgtaattataaattcaatacttatgttttccatgttgattgagggaggcaattttatggataccaattaatcttgagatcctgaacatgtgctgatttttattgtgctatatagtatataaattgagatatttttggtatttctgcaacgtgacctgataatgaatctattcatcctgagtaagctatacttctgtgctttatattgatatgtgtattcttttgagattttatttacatgttgttaataaagttgcatgctaaaactggtg

SEQ ID NO: 16986 - DNA, 981 bp, Homo sapiens
taatggttaattgctggcctcagattgtccttatgttcctgagttatgatccttgagtaatgctttgattttaatagttggttctgtgttgcaacatatatctttagtgctgacactaactttgtccaactctgtctgtaagctggagcatttttctgatgccagctgaatattagagctgaaaacacatttgttgatatttgtcttgtccacattgtgatgttcagtatttgagcttatagtgaactgagcaatcataaataagccacccttctgattgtcgttctactgtatatatatatatatttgagtgttgtttgtgtttcaataaagtcctatgttaaagttggcagaaatcacccttcttcttgaaattaaaatacagacccaatgataacacatgaacacacatagagataattaatatatgaataatatgttcctttcaaaagtttttttctcagctttaaacgcaaaaattaccaggggctgctatgtagggcatacttcagagaaaaagtagctacttcggttggactctgaagtttgggaaagatattggtggtgtaaaaaaaaaaaaaagcatggagttaggaaaaattttcctatgggagtgaggtatcctgtttgcctagagtgagtgagaggaatatattgagcaacatagaggatgacataagttttaaagagctgaggatttgcattttacagctcaaagtacaactgctgcttccatactacctaaagggcaaaagaataagacaggaaagcatagggatttgattgagtcaggaagacaatttaatcatgatggtaccatggtaagtgttaaggcaacatcatacagccattaaacatgatgatgtatagggttttaggaaaagccctgacatttttgatatttcatataatagagaacactggtgtcatacatgggaagtatgatcccatttgaaaaataaatgtgaataaattgaccaa

SEQ ID NO: 16987 - DNA, 346 bp, Homo sapiens
tatgattaaccacctgccgctgatcagccttatgttcccaaagagccctgagtagtgctttggtgttcacagtctgtttttttgttgtaacttatattttttaatgctgatgttaactttgtcaaactcttgttttgagctggatcattttgtggatgccaaatgaatatcaaaactgaaaacacatttgttgatatttgtcttgctgtccagattgcggtatttttcagtattaagttttcaatgaactgtgtcacctaagtaagctaccctgctattcgttgtttaaatatatggttctctatttgagtctgtgttttcaataaagttctatgttaaaattggc

SEQ ID NO: 16988 - DNA, 1801 bp, Homo sapiens
aatgagccagagatagaacattttaagccatcttcaaactctagcaggctgtacattacagtgtacacattatacactgcatctttaacacagagtcacctgtgacaggctctaggtttgagctagactattttgggggtatcaaatgaatattataccttgggctgaaaatgtttgatttttatcttgtctagattggcatatttttaacattttacttaagatagcaaaccagttcgttttaagtaagctaacttgttcattagtatctgtggcttaaaatggcaaaaaagaaaatatccttgagtttgtaatctagttacagaagtaaggcatacacacacacaaagataacagtacctagagagagagtgtgtgtgagtgtgcgtgtctctgtgtgtgcacgtgcacgctcatggccaaatgtgcgcactctacataaaggaggcaggagttcctataggctatttaatgtaagagaaactatttttctcctgttccagctgtatcagatactcgttccgcaacacagaaatgactcagaatctcagacaaaatgtattatttgttcaattttaattttgctactacattcataactcttaaattgttaggctgtttcatttacatcaaagttatctcacaaaagagaaggcaggaaacgttttgtgagtgcctattctatgtcaaacactgtgttggcaccatattttacaagtttttttcctcttctcacagtgatcttgtgagttagttacttatatttttattagaactcattattctgggtaccctccaatgagaattagagaggttaaataccttttcctagattcccacagcaggaaggtggcatagctgttttgtctgacaccagaacccatctcaccacactgctttacagtcttcctgaaggacattttgaggtgggggggccttcaaagctcagagactggtttgaatggtttaattttgcaatggatcatgtccatgccaggtgttacaattcttaacttcctccaaattcgtgtgtccattagacatttggctacatctggctggaggtcaggagaaaattctgaggtaaatagatggattttatctggcagtgtcgaaaatagtaggagcctaaaactttgttcaatgagtaagatgtagatttggagtcatcagcaggggaaacttgttagatgtcctttgtatctttttctatccatttgtattttttctttcccaaagagctgaaatcattttataccctgaatttaaaaggtaattgcttttttcctccttgcgaaatcataccttaattttttttttttttttttttaccatttatgatttattctcctatgtgtcatatgaaaggccaaggggctttatcttttactagtaggcaagcctgggcatttctgcatttgtgccagctaacactacaaaatagacttaattagagaaatttagacccagaattgcagcttcaacaacacaaaacaggaaagctagaagaggttgctgtgtcaacctacaagatagtgattcttggaagttggtatggaccagaaagcattcccaggacatttaggctatggctgagttctctaagactcagggtgggaattataatccctggtctaagctgatatgaaagtttctatgtgtgaaaatatggagttatatgctttgagattttctgccagttaaactaaaacaagatcatactgtaaatgtttgtaacttgcttccccccactgtatactgtaaacatctttgcatgtcaataaatatgcctctacaacat

SEQ ID NO: 16989 - DNA, 144 bp, Homo sapiens
ggaaggcaccaaaaggaaacaagctggaatcgctccaggaaaaactctgaatggttacacctggaagagggaagatgcattctagattcaaagaaatacgttttcagtttctcatgggaacaatgctgcttgggaatgtgtgtg

SEQ ID NO: 16990 - DNA, 617 bp, Homo sapiens
ttaatttctctgacaattcaattattttctgttattaatgttgccactgctttctgtttgtctgcactttcttgataaatatttgctatcgttttactccagtcattcgatgttgctgagatttacatatgactcttgtcaacatctcatcttttgacccaatcttattcatttaataagaggtctcattcatttgcatggaaaaatgctcattgtatattgcaaagtgaaaataacgagttgcaaaacagtgtatacatatatgtgtgtatatatgtacactttatttgtacatttctatgtgacataatgcaaaggaaagtgtctgattttattatacaccaaaggttaacagtgaatctctgtgtgatctctttttttttctttttgcctatctgcatcttctcacttgccaaaaaatgaatatatgtttatgtgtgtatattacttgtgtcacaaaaaaccctaaagtagacagtaaaagaacttgtcaatcgcctttggaaggcaatgaaacacttaataaactctcaataacagaagcgtaaaaatgaaatgtaaacctccaattacctctggatctcttagccagagtaataaactggtaattattacag

SEQ ID NO: 16991 - DNA, 468 bp, Homo sapiens
tttaccttgatttttatctgatattaacaataccatatagcttgctttttattagcatttcctgatattcctttgtccatatttctacttataacctgttgctattaatggttttagatgtatctcttgttatctgcatctcattgtttattgtattttgaaccaatctacaagtctctgtcttttaataaaagaactttacacatttgtaaaaaagaggttcttggtaagatataaaatggaaaaaggctaagtaatatgtgaatatcatatttttgaaaggtaaaaagtacatttgtatattacatatatggacataacttgtgaaggatgaaagaaagtacagcctctcggtggtgggattatgaatgatttttctccttttgcttgtttgtattttctatattcctaaaattaacacacattattattgctagaataataaaagttttataaaaaagaagcaac

SEQ ID NO: 16992 - DNA, 244 bp, Homo sapiens
ctcctgccatttatcatgagattaatactgtgattcccgctgttttctttttccttgcattttcctaatatgcctttactgatccgtttgctgtgaaccctatgttatttccatgtgtcaagtgggtcttgtgttgccagcttctatttgaagattgcctttgcactcagtgtaagtttctgtcagcagtagtttcacccatttgcatggaaaaatttaaagctaataaagcaatttaaaaagc

SEQ ID NO: 16993 - DNA, 402 bp, Homo sapiens
tgtccctggcaggcatttaccaggccatgtgctttaacgttacggtaatactttactttaggcatccctcctgttgctagcagccttttgacctatctgcaatgcagtgttctcagtaggaaatgttcatctgttacatggaaaaaatgttgatggtgcattgtaaaattaaaaaacacaacttgcagaaccaaatatatggcatcagtacatttttgtaaaactacaaagatacttacctagtaatatagtatagaaaacaattctgaaagctgtgtccactaaaagattaacagtggttatctctgggtgattttttctgttcttttttgttcatctgtccatttttctcctaaaaacagatttctttagtcataaaaataataaaatataaagtattgg

SEQ ID NO: 16994 - DNA, 259 bp, Homo sapiens
tgcctttggccttccattctgatttctctgatgagaatattgctggccctgctttccctggtaggtatttgccaggcccaatgctttaaccttaagctgatactttgctttagatgtcagtctcgttaccagcagccttttgacccaactacggcgctctatattttagtagaggattttcacccatgtgcatggaaaagatgttcatggtacattgtaaaaaaataaaattaaaattaaaaaaagtttgcagaaccgc

SEQ ID NO: 16995 - DNA, 550 bp, Homo sapiens
tgtgttcggcctttaattctgttttgcctgctaatagtattgccattgccacctggactttctgtttgcattttcttaatgccttttcccatattctgaattttaactttttgtgaggctttattttagatgtttagcatgtaactcgcttaaagttgaggtttccccctaaaatctacaagtttccctctttcagtcatgagccctacacatttgcatgaaagatgtacattatatattgtgaaacgaaaaaagcaattttcaaatggtatatattgtatcccatttttgtaaaaaaaatgtatatttatatattaatatgcaaagaaaaagctaaaagtatagacttcaaaggcataacagtggttgtgtggtaagataataggtgattttttaaatttttgttttatctgaatttctcattttttcaggacaaacgttttacttgtgttgcaaaaatatataatgaaaaaatcacacaattttgaagaaaactgtcaatcagcttataacgacaatgtggcacttaataaatacttgtcagaacttt

SEQ ID NO: 16996 - DNA, 32 bp, Homo sapiens
ttcttttgtttcaataaacagcaatgagcatg

SEQ ID NO: 16997 - DNA, 2019 bp, Homo sapiens
tcccccgtagaaatccccctttctctaatagcgaggctctaaccacacagcctacaatgctgcgtctcccatcttaactctttgcctttgccaccaactggccctcttcttacttgatgagtgtaacaagaaaggagagtcttgcagtgattaaggtctctctttggactctcccctcttatgtacctcttttagtcattttgcttcatagctggttcctgctagaaatgggaaatgcctaagaagatgacttcccaactgcaagtcacaaaggaatggaggctctaattgaattttcaagcatctcctgaggatcagaaagtaatttcttctcaaagggtacttccactgatggaaacaaagtggaaggaaagatgctcaggtacagagaaggaatgtctttggtcctcttgccatctataggggccaaatatattctctttggtgtacaaaatggaattcattctggtctctctattaccactgaagatagaagaaaaaagaatgtcagaaaaacaataagagcgtttgcccaaatctgcctattgcagctgggagaagggggtcaaagcaaggatctttcacccacagaaagagagcactgaccccgatggcgatggactactgaagccctaactcagccaaccttacttacagcataagggagcgtagaatctgtgtagacgaagggggcatctggccttacacctcgttagggaagagaaacagggtgttgtcagcatcttctcactcccttctccttgataacagctaccatgacaaccctgtggtttccaaggagctgagaatagaaggaaactagcttacatgagaacagactggcctgaggagcagcagttgctggtggctaatggtgtaacctgagatggccctctggtagacacaggatagataactctttggatagcatgtctttttttctgttaattagttgtgtactctggcctctgtcatatcttcacaatggtgctcatttcatgggggtattatccattcagtcatcgtaggtgatttgaaggtcttgatttgttttagaatgatgcacatttcatgtattccagtttgtttattacttatttggggttgcatcagaaatgtctggagaataattctttgattatgactgttttttaaactaggaaaattggacattaagcatcacaaatgatattaaaaattggctagttgaatctattgggattttctacaagtattctgcctttgcagaaacagatttggtgaatttgaatctcaatttgagtaatctgatcgttctttctagctaatggaaaatgattttacttagcaatgttatcttggtgtgttaagagttaggtttaacataaaggttattttctcctgatatagatcacataacagaatgcaccagtcatcagctattcagttggtaagcttccaggaaaaaggacaggcagaaagagtttgagacctgaatagctcccagatttcagtcttttcctgtttttgttaactttgggttaaaaaaaaaaaaagtctgattggttttaattgaaggaaagatttgtactacagttcttttgttgtaaagagttgtgttgttcttttcccccaaagtggtttcagcaatatttaaggagatgtaagagctttacaaaaagacacttgatacttgttttcaaaccagtatacaagataagcttccaggctgcatagaaggaggagagggaaaatgttttgtaagaaaccaatcaagataaaggacagtgaagtaatccgtaccttgtgttttgttttgatttaataacataacaaataaccaacccttccctgaaaacctcacatgcatacatacacatatatacacacacaaagagagttaatcaactgaaagtgtttccttcatttctgatatagaattgcaattttaacacacataaaggataaacttttagaaacttatcttacaaagtgtattttataaaattaaagaaaataaaattaagaatgttctcaatc

SEQ ID NO: 16998 - DNA, 1666 bp, Homo sapiens
taagggtgaatttatcaacgttctttgtgagcattaaaatactccatccttatgggtttacatgcatcttgaccaaaattttggttagggctgtgctgatgtaccattaataatttaagccagtggttcttggcaggtgatcccaagacctgcagcttcagcatcacttgagaagttgttaggaatgcatactagtgggccccgcccccagacatagtgaatcagaaaccaacagggaggcgcctagcattgtttttttaacaagtgctgggttattctgatgcacagtctagtttaagaaccactactttgggtaaacgttttgactgtttaaagtttatggcggtgaagtgggcgtcttcaaagactagtacttacacagtttagaagatttcaaggtactgctgacagtagtttattatgtcagtatacatacatgtgtagagatcataatttagttcccttcttaatgttacaatttcttagtttacttttcctaaagggccatagcataattcttgattcctggtggaaatcttttctgaggtgtgggggtgggcaaggtgtggattgctgtttacgatagtgccttcattagttttagttctgtctgttttcattcattattgactcaaaggtattagaacaggcccttatctttttcctattagatttatttttgttttttactttatgtaagttcagaatccttttttaagtgatgactactgatgaaataatgttactagtagctgaattttagacttgatgctatgttgattaatatttaaatggtgaaagtaattaggcaaaataagcaattctgcttttctgttgctttcagaatttttaggctgtaaaattgtctcaggcaggaagtcagtctatatctctctcaagttcttattgtaggtcatttttttttcagcacagctctaatttttaaatatttggtataacagcttctggcatgtgacctagttaatgttgaaaattaactgatgaaaacccttgtagatctgctaaacttctctataaattgctagaaatatacagagcaatgagatatagaaaacaccttagcttgttggttattaatagagctctaattttaactgtgaaatcatggagtttctttaaatgttttcctagagtgtttgttatcatgaacattagaaatagcattattccttttcttctaccacatgtcttgaacattcacatgggttaaagaagatggaaactgatactactgacaatcaagctgctttctgactttcataattttctttatattgtggatagcattttgaaggtgaccgtgattctgtaggaagagctgtaatcaatatttttcaaactctaagagtacagaggttagtaagatttcttttttttttactttttgttacgtcaagtagcttattaagaaaaagattcatgacttaaattcttaattctcagttgatacaaaggcttataatcatgtgttttaaaattttgatttcattttcgttccttgaaggttaaagaatggaaactggggataaaaattaatacactgcagctttgccaaggtctgtgatatggttgtaaccttttaaagactactaaagtcataatttgaaatttttactaaaataaaacatatgtgtctatggttttc

SEQ ID NO: 16999 - DNA, 168 bp, Homo sapiens
tgaaaaatctgaattcctctgaacagctagataagcatagagaatttctgttataccaagcataaagtacacctaataacgttgtgttaaaaaagtgtttgaagaaaaaggtacaaaaatggcttttatacttaaatatttttgtttacatttccagaatagtggggg

SEQ ID NO: 17000 - DNA, 3004 bp, Homo sapiens
aagtttccagtgatttattaccacattataaacatcatgtataggcagtctgcatcttcagatttcagagattaaatgagtattcagttttatttttagtaaagattaaatccaaaactttacttttaatgtagcacagaatagttttaatgagaaatgcagctttatgtataaaattaactatagcaagctctaggtactccaatggtgtacaatgtcttttgcacaaactttgtaacttttgttactgtgaattcaaacattactctttggacagtttggacagtatctgtattcagattttacaacatggagtaaagaaacctgttatgaattagattacaagcagccttcaaaagaattggcactgggataagatttttcagaaaaagaaaaacatcggcaaactgtgtgtgatttttccaaagctatataaagaaccaaaggtttagtcaagaaacaaaaatcttaaagattattataacccagactaaggttgaacaacctgcatgcccagagaaaactatggcgacaaaggggaaaaggccaccactcgttttctcactgattcatgccaattaagcctacagttaaagaccagttttgttcttttcacccatttttaagctggttttctcctgataagaagaaaggaagaaagccccagacgcttggtttttctcagaacccccaaaagatgtgcaatagctgttgttacaaaccaccaaataatacagttgtgagcctgaatacaggactgaactcctatacacgtgtactgtagaatgagtattttttaataccttaaggtaggcgtcaaattctactccccaaagcagagatagattgatttatcaaaattattatctggccaacagtgtgactatcagacagcatcaaatatttgcccaatccaagattagactacacaaaagcttccttccagtattaaacaaaaagaattaaacataactatgaaaaaactttgctaatatctgtgtttttcagatttcattttttgtaaaatcagaaattaatctaaacatattcagtgataagttcatgtgtaacgacttaatgttaaaggttaaaaaaaagatttcacaaaatatacaactttcaccatatatataagcctgcaaaattagagtagtgaaagtcatgctagtccatcacccaaatatgttatagacgccatagacaggtgatgtttggtcacctatggtaactgctacctgatgaagagcataatttctgcatatccatcctcaataccatggtaaattctggggcaatagagaagcaacagaactgccacaaagtatacctcaatataattcctctagttctgcttctaaaatctgaggacagtgctagtgggaaaataattttcaaactacctggttaaccaaaatacaaaagcagctgactatgtgtgatttcataatagcacatttcttgacacttagtgctagaaatgaagatttggattttcctaacaacttacatcaagaatgtagtgtagctcattattgagaatttaggaaagcctgaatccattaattaaggaaataaatgtgactcacatttcttttactgtgacacaataatgtgatcctaaaactggcttatccttgagtgtttacaactcaaacaactttttgaatgcagtagttttttttttttaaaaacaaacttttatgtcaaattttttttcttagaagtagtcttcattattataaatttgtacaccaaaaggccatggggaactttgtgcaagtacctcatcgctgagcaaatggagcttgctatgttttaatttcagaaaatttcctcatatacgtagtgtgtagaatcaagtcttttaataattcattttttcttcataatatttactcaaagttaagcttaaaaataagttttatcttaaaatcatatttgaagacagtaagacagtaaactattttaggaagtcaacccccattgcactctgtggcagttattctggtaaaaataggcaaaagtgacctgaatctacaatgatgtcccaaagtaaccaagtaagagagattgtaaatgataaaccgagctttaaaggataaagtgttaataaagaaaggaagctgggcacatgtcaaaaagggagatcgaaatgttaggtaatcatttagaaaggacagaaaatatttaaagtggctcataggtaatgaatatttctgacttagatgtaaatccatctggaatctttacatcctttgccagctgaaacaagaaagtgaagggacaatgatatttcatggtcagtttattttgtaagagacagaagaaattatatctatacattaccttgtagcagcagtacctggaagccccagcccgtcacagaagtgtggaggggggctcctgactagacaatttccctagcccttgtgatttgaagcatgaaagttctggcaggttatgagcagcactagggataaagtatggttttattttggtgtaatttaggtttttcaacaaagcccttgtctaaaataaaaggcattattggaaatatttgaaaactagaaaatgatggataaaagggctgataagaaaatttctgactgtcagtagaagtgagataagatcctcagaggaaacagtaagaagggataatcattaagatagtaaaacaggcaaagcagaatcacatgtgcacacacacatacacatgtaaacattggaatgcataagttttaatattttagcgctatcagtttctaaatgcattaattactaactgccctctcccaagattcatttagttcaaacagtatccgtaaactaggaataatgccacatgcattcaatgggatcttttaagtactcttcagtttgttccaagaaatgtgcctactgaaatcaaattaatttgtattcaatgtgtacttcaagactgctaattgtttcatctgaaagcctacaatgaatcattgttcaaccttgaaaaataaaattttgt

SEQ ID NO: 17001 - DNA, 1609 bp, Homo sapiens
gttcttctgccagaagcaattatttgttcaatttctgctgttgatgggttagattacgaggcagctgaagcaaagtatctaaaaggaccatgtctaggctacagggaaagagaattatttgatgcaaaaataatatatgaaaagagacgaaaagcaccaacaaatgaagctcactaaatgtgctgaaagttgaaaccatgacagggagctctcatagatactagttgaaaaaagtctctgaacaattctctctaatacatattttctgcaaatgggagcatggataatgtgttcacttttttttgagatctctaggatctgtggttataattacatctttatttccttttcttgcgcttcttcaaagttaattttgtcaacatatttcagcagttctactttcccgtacattttttagaaagcataattcctaaatgattttgaagggaaagtactattttgttttatgacacttttgagtctatgctgtattgttaaatatattgtgcacaattattttaatgttaaaattgcactggtgttagatattaacgaagatgattggaaaaaagtctgaaagatacatcatttctatattccttgcttaatttttataaaatattgggttttcccttaagatagttgaagtatttttcttgccatgcctatttatttttgcaaaaaaattatctgctatatagaaccaaagatagattcgctttgctatatattataactatacttgcttttgcaataaaacaacttgtaattcaaaaatgaagattatctgcatatagtatttatgtgtgtgaataacatcttggcatgcagaaaataattttggctgctttgaacaggattgttcattctacacttccctgaaattccatttttgggagtgtctatccttcaatggctgaatagttccttaaatcagacaagctcctggctatcttcataaccagcagtgagtagatcttcttaatatagctgtctgaccacatgtggaaggcagctagacttattgtatttacagcctggccactctagacatatgaatccaggctgactgcttaagtgcccatctcgtttgatataaactgtagaaaaggcaagcactttgttctgagtcttttatctccaaatacatagttgtctcaaaccaagcaagctttatcaaaatggcttatttgcagaatagttccaatgatataaatgccaactggcaagtcattccaaactgcttgaaggagtagatgaaccagaatctgagaatttggaaataggtcacagaaaaagcctccatttggctaaatatgacaattatctgagtatggttaaatacatacaattaaatgtctgaagccaatgagttgtttattctaacttgaaatatatttttgtgagaataaatgttagaaaagttagtttattttggaaacctgccgtgaaaggaaattctaaaggcttaacatgaaactgtctgcatttctacctgttagacaatggttgctcttgggctcttgttatacagtcatatggctacacgtttatgtaaagtttgcaaaagtttggtgttttgatttataataaaactgttatattattc

SEQ ID NO: 17002 - DNA, 1184 bp, Homo sapiens
aagttagcaaatgaaattattacagattatacgagtgtactgctttaaagatattccatcattttgctggtaatttcagtaactgttttcagcaagaatattacatgagctctaaagttattaagcagttttatgttcgttttgtgtttagggagctttttaaaacacttcatttcagattcattattgaaaaaggtcatcaaaataatttttgtgtataagggaatttaccttgcttaccttactagtatgactattatcttgacttctggtaatttatgttcactattccatttgtgaagtgtactttcattctaaagcctcagtataaggcatcctaacttacaagagtaactttccatggacatttaacatccttccaattttattcacatataatgggaaattttgaattgccagtttgaagactgttctcctaaagtgttcaacctgcacttcttacaaccaaggtagtttgtatcattttcaaaagtacacattattagggtctagttgcccctggtccttagcttgctcagctgcaaaataagcgtgctaaattaaattgtcttaaggtttttccacttcattttgtgactttgtgtggttcgaatttctcagtattttaaccagtgtgttgatgttaaagtcaaaggctgcagtatgtctatattcttgctgtactcattggtagtttcagtatatgtaatgtgagtttaaatagtgaaattgtatctcatattaacatttcaaatgctcatattgaaaatggaaaatagtaaacacgggaattgattttattctggttgtctataatacttcattttaaatgtaaatggccactctgcatttgcaaggcccggtggttgacatctgtgtggtttgttagatgagacaaaatgaccattaaatgagtttatagattattctgtatcaagataaatctgattccagttaagctataaacttgtgggattttcttgtagccctatagttctgtgacttcatttgctatacgctttaaatgtgttgagcagcctatgaacctaaagacatactgcagtttgttcataaatgtattcagtcttttattctttataattgtgtgtaaatgttaactaaacagtggattcctctcgtgttacagttttgagtgaattattaaagaagttaaaatgcaataa

SEQ ID NO: 17003 - DNA, 1301 bp, Homo sapiens
aatctgtgtaaatagaaaacttgaaccattagtaataacagaactgccaatcagggcctagtttctattaataaattggataaatttaataaaataagagtgatactgaaagtgctcagatgactaatattatgctatagttaaatggcttaaaatatttaacctgttaacttttttccacaaactcattataatatttttcataggcaagtttcctctcagtagtgataacaacatttttagacattcaaaactgtcttcaagaagtcacgtttttcatttataacaattttcttataaaaacatgttgcttttaaaatgtggagtagctgtaatcactttattttatgatagtatcttaatgaaaaatactacttctttagcttgggctacatgtgtcagggtttttctccaggtgcttatattgatctggaattgtaatgtaaaaagcaatgcaaacttaggcgagtacttcttgaaatgtctatttaagctgctttaagttaatagaaaagattaaagcaaaatattcatttttactttttcttatttttaaaattaggctgaatgtacttcatgtgatttgtcaaccatagtttatcagagattatggacttaattgattggtatattagtgacatcaacttgacacaagattagacaaaaaattccttacaaaaatactgtgtaactatttctcaaacttgtgggatttttcaaaagctcagtatatgaatcatcatactgtttgaaattgctaatgacagagtaagtaacactaatattggtcattgatcttcgttcatgaattagtctacagaaaaaaaatgttctgtaaaattagtctgttgaaaatgttttccaaacaatgttactttgaaaattgagtttatgtttgacctaaatgggctaaaattacattagataaactaaaattctgtccgtgtaactataaattttgtgaatgcattttcctggtgtttgaaaaagaagggggggagaattccaggtgccttaatataaagtttgaagcttcatccaccaaagttaaatagagctatttaaaaatgcactttatttgtactctgtgtggcttttgttttagaattttgttcaaattatagcagaatttaggcaaaaataaaacagacatgtatttttgtttgctgaatggatgaaaccattgcattcttgtacactgatttgaaatgctgtaaatatgtcccaatttgtattgattctctttaaatataaaatgtaaataaaatattccaataaaagtttgtgtctggtgttagttt

SEQ ID NO: 17004 - DNA, 2180 bp, Homo sapiens
atccctaggaattgcctatcatagacaagtttactaacattcctgtagctgtcagtttgattcctgtgagtagggctcagggatttatcttgttaccaatgtgtctgaaggccaaaatatatatccagaagcacaatgcatcattcctttgttgttgataatgggctttgttagcactttttaaaacaaacaaacaaacaaaacaaaaaagcaaaccacatttgttatctcaaattttgatgatattctcaaatacaaatatacttttttatatttcacaatatatgcaatatcaggggaatatgctaaatgttaccaccagagggcacaagcatatcacttttagtaaggaaattactagcttgtgttgctatttacatatgaattactgattattttgaaaagacggtgttatgcttgggtgttagtgaggctgatatgtcatgtcaatcgataaaccctactttccaaattatctaaaagattaccatttggggcccttgttttcaagttatctaactgaaatattattaatttttttaagttaatctcattcagtcttctagtaataaatgcttttttaagtaccttctacagtcttcctacctgaggggttcagaggctgctgactcacactgctaactctgttactgacaaaagcaaatcaataactctaaattctgggctgatataaagaaaaaaacaatattggatttggatttaatctgggtaaaatcagccttctgagaagggctaagaaacagttcaattaactgtataggtctttcattagaccgagacatcactagaaattctgggcactgctgtttgtggtatttgtctcagagtagcttatgactgttttggttctagctttagattttggattttcaccagtcatgtgttaatttacattagatagtaaagaatggctacactaagactgaattatcttattagtctggcaagcatataaagtatacttgtatgtaatgattgccaaggtaacagaattgctgacatctgtctaaaaagttttgactatccaatttagatgtgtaatttctatatactttatgctgtttatatttcagtcattacaccaagtccatttagagataatgggctttgttagcactttcaaaaaaaaaaaaagcaaaccatacttgtccactgtcctgtgctattcctaccaaggacaatttattaatcaattgacttagaaaatagggggagaaatcattcattggagcttctttctttagaaaagactttggttataagccttttgacttttctagatgtgaaaccatgaaagggcagacctccttcagagtgactcaagaggtctccctttcttggagggagttggtacagtcagcctttgggaagaatccactgtgaacaaagcttaacacatggggcttcatcgctcatagaatatgttattttcaaagaagttcaagaattttcaagttgagcctttgaaaatcccataaattggttttagctaaacacttactagtagtgtctttaaattatttaatcaaccttgtcttttcaaggaaattaccacttaaagagatagttggtaaataaacatctatgccttttctcagaaatgatttgctgaactatgtccatattttacagcttagataatagtttatatggaaactattatacatctgctattgtgcaatgattgttaaattatactgaagtagctctagaaagacacatgtatacaaggcactattgtacacactttgctgaatattttgtcagttgtatttacaaagaaaggtactttcttaagagcatatatgttattaatatttgatatgattttaaagtcagaatagtacagattgctgagtattatactttaggctagattaattaaaattgaatactgaaagagattttttgagttgcaaaaagtttataaatgcaaagcaaaaagaaaacatttattttctgagtctgcaggagaaacaaactaaacattatagttttatagctgctatcttgttaaccaaacaggttgttcataatattaaaaatcttacgtagttgtgttaaactgaaccagttcattataccttatgcattaaattaaatatgttataaggtggctttacttgtctttataaaaataaatatatctactaaacatg

SEQ ID NO: 17005 - DNA, 525 bp, Homo sapiens
aaaaaggaaaatctggggtagcacctggcatgctctttctccaattttctactacttactcctattccccaaattctcccatcaaggaggaaatgaactctgagacagaagatgagttttcctcaaagcttgaccaggatataagtggatgccttattgggcaaagcagagggtaaccaattagaaggccctggcttctcttgattgatagctgagaactcatcagagggatcagtgctttctctgtgtattgctggagtctgaaagtgtgactctcatgtcactgattcatttctgaagtgttaaattcagaataaatttttgataatcaaaatgaacttagagaactttgttgtttggcattgtcaagagtgaagaattctaattatttgtgtatttatcttgtgttatgctagatattaaactccctgaacatgagactatttcattaattggtatagctcttataatacctagtacaggtctctgcatataataaagactcaataaataactcttcaaatg

SEQ ID NO: 17006 - DNA, 1940 bp, Homo sapiens
agaaccaggggccagagctggggggtggctgggtctgtgaaaaacagtggacagcaccccgagggccacaggtgagggacactaccactggatcgtgtcagaaggtgctgctgaggatagactgactttggccattggattgagcaaaggcagaaatgggggctagtgtaacagcatgcaggttgaattgccaaggatgctcgccatgccagcctttctgttttcctcaccttgctgctcccctgccctaagtccccaaccctcaacttgaaaccccattcccttaagccaggactcagaggatccctttgccctctggtttacctgggactccatccccaaacccactaatcacatcccactgactgaccctctgtgatcaaagaccctctctctggctgaggttggctcttagctcattgctggggatgggaaggagaagcagtggcttttgtgggcattgctctaacctacttctcaagcttccctccaaagaaactgattggccctggaacctccatcccactcttgttatgactccacagtgtccagactaatttgtgcatgaactgaaataaaaccatcctacggtatccagggaacagaaagcaggatgcaggatgggaggacaggaaggcagcctgggacatttaaaaaaataaaaatgaaaaaaaaacccagaacccatttctcagggcactttccagaattctctcatatttgtgggctgggatcaagcctgcagcttgaggaaagcacaaggaaaggaaagaagatctggtggaaagctcaggtggcagcggactctgactccactgaggaactgcctcagaagctgcgatcacaactttggctgaagcccctgcctcactctagggcacctgacctggcctcttgcctaaaccacaaggctaagggctatagacaatggtttccttaggaacagtaaaccagtttttctagggatggcccttggctgggggatgacagtgtgggagctgtggggtactgaggaagacaccattccttgacggtgtctaagaagccaggtggatgtgtgtggtggctccagtgggtgtttctactctgccagtgagaggcagccccctagaaactcttcaggcgtaatggaaaatcagctcaaatgagatcaggcccccccagggtccacccacagagcactacagagcctctgaaagaccatagcaccaagcgagccccttcagattcccccactgtccatcggaagatgctccagagtggctagagggcatctaagggctccagcatggcatatccatgcccacggtgctgtgtccatgatctgagtgatagctgcactgctgcctgggattgcagctgaggtgggagtggagaatggttcccaggaagacagttccacctctaaggtccgaaaatgttccctttaccctggagtgggagtgaggggtcatacaccaaaggtattttccctcaccagtctaggcatgactggcttctgaaaaattccagcacacctcctcgaacctcattgtcagcagagagggcccatctgttgtctgtaacatgcctttcacatgtccaccttcttgccatgttccagctgctctcccaacctggaaggccgtctccccttagccaagtcctcctcaggcttggagaacttcctcagcgtcacctccttcattgagccttctctgatcactccatccctctcctacccctccctcccccaaccctcaatgtataaattgcttcttgatgcttagcattcacaatttttgattgatcgttatttgtgtgtgtgtgtccgatctcacaagtatattgtaaacccttcggtgggtgggggccatatcctagacctctctgtatcccccagactatctgtaacagtgccaggcacacagtaggtgatcaataaacacttgttgattgag

SEQ ID NO: 17007 - DNA, 944 bp, Homo sapiens
aactgcatgaaaaagataaaaagtagtaaaatggcattggtaacaattaaaaaactttgaaaaaaatgattgttttctatattctctttattattctgacatatttttgaaagggacaaaattcagttctagtgatattgtgaccatttacagtaatttctattactctgttaggaaatatgtttccttggccaggtgcaatggctcatgcctgtaatcccaacactttgggaggccgaagcaggcggatcacttgaggtcaggagtttgagaccagcctggtcaacatggcgaaaccctgtctctactaaaaatacgaaaattagcctggcgtggtggcaggtgcctgtaatcccagctactctgtctcaaaaaacaaacaaaaaaaggaaatatgttttcttatgtaaataaactattctatttttatagtgatagctgagtagaatctttacaggttaaaaaattagaatatttcatggtcaattacataattgaaatatgatcatgaaatggttggtccacttacttcagtagtctgaaaaacttatgctaattatttacatttacactgtgatacaatcagttgcatagcaattggtcattattattaccagagaattttatttggttgctttttcattgatttgagcaaatgatttacagtgttctctgtttaggctctcactgttgttctggaatatacaggtaataaatagtttgatgtaccatactatcaacatatttacttgagtaaggaacacttttgtgcgtacagtattatttggcttcttcagttgtgcttttaatgcttggatatagttaggttaaaaacattttttatatgcactaataattattagcattgcctttttgggtactgtatttatatgtagtcaattgaaatccttgactttaaaataaatttaaagtgtggcacattt

SEQ ID NO: 17008 - DNA, 993 bp, Homo sapiens
tagagtaacttctgaggctttttgagaataaaatccaccccacccttgtttccccttggtatttgatgacaaattcagcagaagacccggcttgctccagtgtagctttctacatcccacatcaggtatattagagcttatccgaactggggaaagacggattgagattaactgctgggacctcctacctgcattatctcattctggcttccttgataattctgtgggccttgcagctttaactatagctcagctgctgcaagatttcagacttttgaggatgttgtgtgagggtgtttgactgtgactggggaagctcagactactttgtatgtgaatgcttcagggttttctttgttgagaacaactagcaacaaaggcaacccatgtgtgaccagttctccccaaggtctatgctaaattatagcaagagccctgggcaaccccaaacctagtcctggtagctgagcaccctgtaaggcaggagcaggcagctcagcttgagcagacattgggtggggggtggggggtggttgaggggggaggcagcacagtgcagcaaatgtttcttgggaggaagaagcctgatccatcaccatctgcttgactatgtagcttggattctcctttgtacctatccctttcgatttggctttaccttcatctatcttgatcctttcctggccaaatatcctcttgggcccaaatgaacattgtaccatagtcttctggaaagcaaacatgcttcctgctatgtaattgctaacattcatattagatgatgtgctgtagcttgatcttccttagcctactgccactgaggcagtaggttttaggtggtatcgtagtgccttttgattaatttaagtatttaattttcatcttccttctttggatctatttggcctctcaaatgaactgagattcctgttaaaaaagattgatgttattgtctcttgtagaggaaactaataaagtgtgtgtacctgtgtg

SEQ ID NO: 17009 - DNA, 118 bp, Homo sapiens
gtttcaggagagtatataattcactggctctctagttcagcagttcttcccctcctacacctaagttagcgttcaatatacgagacacaaaataaagtttgtttgaagcatccaaaat

SEQ ID NO: 17010 - DNA, 1802 bp, Homo sapiens
gctggtggcctaagtacagcattaatcattaaggaacccattactgccatttggaattcaaataacctaaccaacctccacctcctccttccattttgaccaaccttcttctaacaaggtgctcattcctactatgaatccagaataaacacgccaagataacagctaaatcagcaagggttcctgtattaccaatatagaatactaacaattttactaacacgtaagcataacaaatgacagggcaagtgatttctaacttagttgagttttgcaacagtacctgtgttgttatttcagaaaatattatttctctctttttaactactctttttttttattttagacagagtcttgctccgtcgcgcaggctgtgatcgtagtggtgcgatctcggctcactgcaacctccgctccctgggttcaagcgattctcctgcctgagcctcctgagtagctgggactacaggcacgtgccaccacgcccggctaattttttgtatttttagtagagatggggtttcacgttgttagccaggatggtctccatctcctgacctcatgatccgcccaccttggcctcccaaaatgctgggattacaggcatgagccactgcgcccggcctctttttagctactcttatgttccacatgcacatatgacaaggtggcattaattagattcaatattatttctaggaatagttcctcattcatttttatattgaccactaagaaaataattcatcagcattatctcatagattggaaaattttctccaaatacaatagaggagaatatgtaaagggtatacattaattggtacgtagcatttaaaatcaggtcttataattaatgcttcattcctcatattagatttcccaagaaatcaccctggtatccaatatctgagcatggcaaatttaaaaaataacacaatttcttgcctgtaaccctagcactttgggaggccgaggcaggtggatcacctgaggtcaggagttcgagaccagcctggccaacatggcgaaaccccttctctactaaaaatacaaaaattagctgggcgtggtagtgcatgcctgtaatcccagctacttgggaggctgaggcaggagaatcgcttgaacccaggaggtggaggttgcagtgagccgagattgtgccactgcactccaacctgggtgacagagtgagattccatctgaaaaacaaaaacaaaaacagaaaacaaacaaacaaaaaacaaaaaatccccacaactttgtcaaataatgtacaggcaaacactttcaaatataatttccttcagtgaatacaaaatgttgatatcataggtgatgtacaatttagttttgaatgagttattatgttatcactgtgtctgatgttatctactttgaaaggcagtccagaaaagtgttctaagtgaactcttaagatctattttagataatttcaactaattaaataacctgttttactgcctgtacattccacattaataaagcgataccaatcttatatgaatgctaatattactaaaatgcactgatatcacttcttcttcccctgttgaaaagctttctcatgatcatatttcacccacatctcaccttgaagaaacttacaggtagacttaccttttcacttgtggaattaatcatatttaaatcttactttaaggctcaataaataatactcataatgtctcattttagtgactcctaaggctagtccttttataaacaactttttctgacatagcatttatgtataataaaccagacatttaaagtgt

SEQ ID NO: 17011 - DNA, 953 bp, Homo sapiens
aatcctgggaactcaacttgaaggtctgtcttccatctggcaccataaaaacatgaacttattgcataaaacttttctagtcagcaagtgcctgatatgccaatagcatacaaactcaatagcaatcatgactgagccaatcactgtttctcagaaaaacaaaacaaaacaaaacaaatgacagtaacccttccccggaaagaaatagaacaatcatggagcctaggagcagagagatgaggaggagttcattgcttcccagcttgtgttatatggctacagcaagtcttcagctgctgcaatgaggaaatgggcatctggaagacaaacagcaactctcagcttgcttcaagaaccagcagataagagatggttaagctgttcttcaccctttcagatgtgacctcttttggactaagcagcaatctgttctcttgctcaaataataaagtgactgaatcagggaggaaaaggttcttgttaaattatttgattgtgtagttgaagtaattataatttatatcaaaacgtttgtcaaagaaacgatgtcaaatatacacttcttgatctcccttctgtttgcggggatcttactatttgatgggtcactgtccccattcttactgatacttttgtcagatatcaccctgtccttaaatcatgatcacttaaatcaggggtcagcaaactttttctgtaaagggccagacgggaaatattttgggctttgcaggccatgcggcctctgtcacatctactcaactctgctgttgacatgcaaaagcagcaatagacaatatgcgtgtaaatgagtgtggctgtaatccaagaaaactttatttacaaaagcaggtggagggctgggtttggcctgcaggctgtagcttgccaatcagtgacttaaattgttgatttttgtttgataaattaaaaataaattgtgtttgaagtat

SEQ ID NO: 17012 - DNA, 1167 bp, Homo sapiens
cattttgaagaattccttttgtgttttaaaatgtgatatatatatatataaaattcctaggatgcagtgtctcattgtccccaactttactactgctgccgtcaatggtgctactatatatgatcaagataacatgctgactagtaaccatgaagattcagatgtacctcagcaatgcgccagagcaaagtctctattatttttctactaaagaaataaggaagtgaatttactttttgggtccagaatgactttctccaagaattataagatgaaaattatatattttgcccagttactaaaatggtacattaaaaattcaattaagagaagagtcacattgagtaaaataaaagactgcagtttgtgggaagaattatttttcacggtgctactaatcctgctgtatcccgggtttttaatataaaggtgttaagcttattttgctttgtaagtaaagaatgtgtatattgtgaacagccttttagctcaaaatgttgagtcatttacatatgacatagcatgaatcactctttacagaaaatgtaggaaaccctagaatacagacagcaatattttatattcatgtttatcaaagtgagaggacttatattcctacatcaagttactactgagagtaaatttattttgagttttatcccgtaagttctgttttgattttttttaaaaaacaaacccttttagtcactttaatcagaattttaaatgttcatgttacataccaaattataatatctaatggagcaatttgtcttttgctatattctccaagattatctcttaagaccatatgccccctgttttaatgtttcttacatcttgtttttactcatttctgactggacaaagttcttccaaacaattctgagaaacaaaaacacacacgcagaattaacaattcttttccctgtgcttcttatgtaagaatcctcctgtggcctctgcttgtacagaactgggaaacaacacttggttagtctcttttaagttacaaaaagccaattgatgtttcttattctttttaaattttaaatattttgttataaatactcacaggataccttatttccctagctatcatctcctgacttaatgttttttaaacccaccaatataaatttaattaaagatatatgttgtaaggat

SEQ ID NO: 17013 - DNA, 1996 bp, Homo sapiens
aggggcaaaagtccattctcatttggtccattagttccagcaattgaaatttatgtgaattattttgattgtagaagcactataatatgtgctgaaactaaatttctttaatattttctattcctgtcagcaccttttctagcagctgccagtttggagcattgccctctaagagctttaaaactatttttttacatgccttatatacattccactaatgacattcttataataatattaaacacatgatcttggtactaacatactcactgtgaacccagcctattgcaaaaataaaatctttttataatattatctatgggatgtcagcacaatataacactctgggaagaagtggagttttttggttattaggttaattttctagtaaaacacgttgcctgttttcagttaacactggtaatgccattttaatatatggctttttcaaatcagttcagtgaaaatagtacagatttaggtttacataactactctgacatactggaattgcatatagagatgttcagtggtcgtttttcattttaagtaatttttgttttggcatttttttgtgtgaagtaaattaatcaactagagaggtgcaaaacgttctcagttgatatctgagtattgggtgcatttggtggcttaaaagcaaagcttcctaaaaagatttttcttggcagctccaggtctatacatttaggtaatgaatggtagtagaactaatagctttaacaggagaatagggaatgagaaatagaaatccaaggctgaagccaaaagtaaggagggtggccaaatggtaaactattggtacttgttttctacctcctaaaaatgtagcttatttttaggatttaaatcactaagtaaataagtatccttgccaagtgatcatgagtgtcatttttgttctaagactaatatttttagatctttttacttcacctcatacttatcaccaatgtatatctccatttattcaataacttactggggtaaaataacagcaataaacctaaccttttaacagggtctaacatgagagttggagtcaaagccattgttatcttttggtgacacccttaaattttaagtcttccagtcttccatgtgaactttaggcccaaagtttcttatgtatcacacatcccccaaataagtgattttttcccagtgctttgtactgtcaactgcattatctttaattatttaaaggtagaattatttaattttgtgatttgttcttccatatgacattgagcaaatagatctgtttcaaaatatgttcccgctatgtggataactcttctttttaaaaagaaaatagagaatagcaaatcttcatgataatcctcaaaagaacaaaatgcttaactttatctcttaatttctaaaggtaaataacctaggttcagcttttgcttaaacattaaatatcttttccattttttaatgtttgtaagctagatatgccagctttgtttctacattgcaaccaaaaactgtttcttttcacttaattataaaaccagtaattcatttactcttgcccaaaactatacactgtatttctgttatagtaacaaaatagagttatgtagaattgtatggaactcaaatttaaaccatgctttcttgtagtactgattgaaacttacacgttttattctactcatagtgagcttattcttattttggattgattttccaaaaccacagcttcagcagcaacaatcagaatgtccaaatgctgtcctttcccttacagagaagaacaatggtaactaaaagctgcatataactagcaataactacattgaacggtgtgcattgttcatgattgttgtgttttaagacttgtatataaactgctttttccaaactctgtataacttttaaatggctggaactactcgtataaggactagactgtatttttgacatgctcctatttttgtaacttgaaaaaataaaattttgccttgtg

SEQ ID NO: 17014 - DNA, 94 bp, Homo sapiens
aggtgcttattttttttttttttcctccctgaggaagcaagtcgtgacttgacttggagaacacccagttcttgataaaatcatgggagagggc

SEQ ID NO: 17015 - DNA, 1012 bp, Homo sapiens
aactccatggaatcttctcctgtgatatctgactcgaccgctaactggaggactggttcctggacccattccattaaactacattataaaccttgttgccttcacccttcagcctcccgctccaggcacatcccaccttacctctcacttggctgatttgaccttctctttcacccacatgcctaagacctgccctgacaatcagagtagggactacaagagtgtatggtgtatgaggttctgaactcccatcaccaccgaggccagtcctagttcttggtccagggagaagtctaggcaggataaatcatatcttacctcaaaaaacccttagcgtatcttgccatgtgtcagcaggcaaacttgaggaagccctggttctatttcacctggcaggggagcctataaggagagcgatgcccactcctataccacccttgtaacccagtagacttgccccatatgccccaactcatagcacctaaaatgggtctccagggtccttgccctgtttatagtatccatcctgaaccattcgttttgacccataataatagtgatagtataatggctaccagttattgataatgtatcatgtgacaggcattgggctaaactcttgacaagcaccatctcactacattcttacagtaacacaacttgttcttgtgttgtcagcttctgacctcttgatctgttgtttatggcctttgtcttgtccctcagtgggggttctctagctctgacctctgggtgaccccctcagttgttgattgctctcactccccttggctgttgtgcttcatggccagcactcttgatgagggtcttggtctataaacaggcatagatagctagaacataatgtgagcagtgtttgccttcaggtggtggggttatgggtagtttttattttcttccttctacttctctatacatttcagattctctacagtaagcatgtgttacatttgtaattataaaagtaagtaaacttcatttatgaaaaaag

SEQ ID NO: 17016 - DNA, 484 bp, Homo sapiens
gactgcaagccttacacctcaccatctccctcatgagtaagactgaaataaaactctgctgcaggaaagatggaagaaaagacagtcaaatggggtgggggttctttacctttcaaatgaatagaaacttcttataagcctttttcctactccctcagattatgtaatttatttgtaagcctgaatcgcagcccaaacagggcagcaatgttgaagtgaccataaagtggtcacttccaccgtgaagcgaaagagccagtagtgaatcccctcattttgtgcattcactttgaagaaaaaggtttctcaaagatgcacactccctcttcatagtgttgtgtttgtttttaagttagagagtagtccctcttgcattcaaacctccttcaaaactccttacccaatgtgatgtttttcacttgcattgtcattagatgtccagaaaaaaaaaagatgtcaaaatgtttttctaaaaaaagaaagc

SEQ ID NO: 17017 - DNA, 795 bp, Homo sapiens
acactaaactctcaacactttaaaagcaacccccaaattcaacctatgtaatgtgattaaatcaaattaaatacataatatatatttacaaaataatataattaataaacttcctacatctatagaatgtataggaaattttatgttgtgcacatttgcattgggtccaaatcctaattgcagtttagtgaaattactagatttttttctaatcttcagtatgtagtgagcattcacaggttttctcctagaatctcaagtggaattggaatcataaaaatgaatgagatttgaaaactttcacaaagattataaatgtagttagtttgatactccttagaataaaaaaatgaaacagtaacaacttttatgtaaaaaaattttacataagagttagcatctttagctttataatctaaggaaccaaatttaaaaaatgatggattatgctctgtgaaatgaaaagttcaatcattgcctaaaaaagatgatcaagttagttgatctcttgtacttggaaaagctacttttttcctaaagaacagagtggagtggatatattcactttttttttctaaaacatacaaagtgataaaataatcgtgcctaatgtcaaaactttactggtttgagaagaataatcaaaaaggacttataccaataggacttactattgttttttaaggatctcctctcacagtggtaatgaaacattaactgtaacagaaatttacaatttatgtgcttataaaattagttttatgaatgaacaataaactgatgcatataatggct

SEQ ID NO: 17018 - DNA, 1584 bp, Homo sapiens
gaggagaccaggaaagtcactttttaaacttacatcccagccttactgatttataacctgcattaacttttaaaatacagatggggaactgtgacaccactttataggcagttatgaactgacacgctttgggggaatttaaacaatcagatcttgttcattggcaaattacccctcacgaaacctaacccgagaatgatgaaaacaattcacaggcactttctgcagttgggattaattctccaagagcaccaaaaacctgcaggcaaaactttgcccagtctgagccaatgaaaataaccgtggaagcacattgggaaccttatcctgaccaatgggtgacatctgggttgagtttgtgtcccaaatcctgaatcttgtgtgcctagaaatgagcccaagacttttaccttcacctttattggtctgtatcctagtttcctgttggcttaggacctttggctgaagtccaaatgacattcctataatctgcttatattctcctcctagagtttggaccatgcttcacctattgactacgatctaccttcagcataaatcaaccttcctggaaccacagctctgccacccttccatagagctatatgttttgtttccatctaaagactcatgctttcccaacaaacagaacctcctggctatttacaaaccagattgaatgggcatttgaatactgcttggaactgttggtccctttttctttgcaggctagcccatcaggcaggtgtatgcttttagccaagcccaccaattccaacttattcctctcttctccaacaaccctacttgaggttccagcatgtcttatagccaagtcaatatgctctaggataaggatttctgaaaggtatttagtgagagttggggatggtgtgtcataattactgtatctgtagcatgtccttgctgccttggacaagggacctggccaaataaatctccactgaagactgacagccagaccctgcagtagtttctaactctagaagcctcaatgtagtcaccatctaggattactactcattgctattgagctctacctttatggaccacctctgaagtccttcatctaattgaggatcttaaaaaacaatgaatggcaaaaaacttcctacactatctcatctgaaaaatcctggggcacatacattaaaaccatttgtgcacaaaactcaggaagtcgggattttattgcttatgttttactcttggtacacaccagctttgtgtagattcctgatgcttctgaacaaaagtagtgttatgctagaaaggcaaaactccctaaaatgttaaaactgttcagcaatgatcactgctggtaattaccagccctctgttccctgcttcttgtttctgatgtatgtccccaaaatggatatcctggagaaatatcagtaatcacatattccctagcaaccatcaaggcctctcagaacatgaaatcccattgtactttggctttgtttctggagaattatgctaactttgacaatacttaaacctaactaggaccttactactctgattctgtagcaccaataaatagatattttcaccttg

SEQ ID NO: 17019 - DNA, 2646 bp, Homo sapiens
gaaagaacagcacagtcttttcctacggtacaagctacatatgtaggaaaattttcttctttaatttttctgttggtcttaactaatgtaaatattgctgtctgaaaaagtgtttttacatatagctttgcaaccttgtactttacaatcatgcctacattagtgagatttagggttctatatttactgtttataataggtggagactaacttattttgattgtttgatgaataaaatgtttatttttgctctccctcccttctttccttccttttttcctttcttccttcctttctctctttcttttgtgcatatggcaacgttcatgttcatctcaggtggcatttgcaggtgaccagaatgaggcacatgacagtggttatatttcaaccacacctaaattaacaaattcagtggacatttgttctgggttaacagtaaatatacactttacattcttgctctgctcatctacacatataaacacagtaagataggttctgctttctgatacatctgtcagtgagtcagaggcagaacctagtcttgttgttcatataggggcaaaaatttgacattgtcagaatgttgtgttggtatttactgcaatgtctgtccctaaacatagtggtattttaacatagcagctggttaaccgggactacagaagtggaaggataatgagatgtaatacaccaaatagcttttcacttcttaaggacagtgttcaaattctgattattacaacaagcaaactgaaattagtgttttcattctggtccttagtaaattcctaattctatgattaaactgggaaatgagatcccagagttatttcccaacccaggattcaacatcaattgggttttgatctcagcatcctggaaatttgtgtgcttcacacaaagtgaaattagtattttgagccttattaaaatattttcttaattatggtacctctgtctataggacttaatttagcagtccatttttgagtaaaacttgtattggaagtatagatggtagaaactttggaagttttacttgattaaggactacagaattgggcccttagaatgtgaaaaaaaaaagtaattaaaaagacacttttaccgaactcgggattacagaaacacggagtttccatttggattttaaacaaaatttatgtcattttcagatccttccaaactctctagtgcaggaaaaggctgcagctaatttgtgaaagtggcaagctcttcattgcactgcagttatttaccagaagtttaaatctttgttaaaatatagtgttgtgttacaataagtgttggccatcatttcattcgtgggcctgctgctctctaagaattcagtagcattttaatagtttctaaaccatgaaaagttttcaagcattgctaaagtcaggccattcagtctatgctgtgtgcagagtatacaagtgtttctagtaacagtatttccatacgtgcccatttcacacaactgtggataaattttggaagaattcatgatgctagttcttacgcttgacagttacttacacacctgagaatgtgcctctcagtatcttaaaattggttaatgaaaaatctgaatttctaaaacccttggtctgtgttctcaacacacagtatagataaatccaatagtctgccacaagggcagtggaagagctgctgtatttgaggaaactcatacagtctctatttgatttgcaacactgccaaacatcagtcaattgcttgagcatgcccaaatataacatgaaagtcaagtctacctgccttgcctgttaggtctgttgaagtgcatgttaaaataattatatgaagcagaatgagatgatttaattcttaccgaaatgaaaatggctgaagaaacacagcatgcatttagcatgagttctgcacatacagatggtgtcctgcatgtatgccatgtatgttgcatgaatccatcgatttgtattaatgtagggcagaatagctgatagaagaaggactgaagaaaatccttcagcaatccttaaaaagaccatgcattcagatctgaagtagtgtgagtgttagaaaaaactggaaacatctgatttctgaactatcagggcaagctcatagcacatgttttacaaagaaacaaaatataaatcacagatttccaaaagtactagcaataagttgaatgataatagctcacagcacatttgttaatgattcttgtgtcatcaagtagtagtacttaatagtacccaacctggtaattatcctcaagttgtgtgctattcgtaagttctgtgcagtttggtatgaaacaaatatactcatttggatataaatcttacccttcaatgttaaatctacaaacttttataaatgttttaaagaagtccatgtgataattgtaaaggtgatgaatttaccatcaaacaaatcattttgatgtattattatatatgtatatctgtgtaagacacgtgcaacagactgccttatattattttctgtaattcttctcctttgtcaaatggtattttttgtgaatggttgcaaagtgttgtcttattcctaattcctgtatgttatccactacaggttttatgagacttcctattaatttattaaatttattaaatgttg

SEQ ID NO: 17020 - DNA, 750 bp, Homo sapiens
tcatcagaacaatgtgttgaattctgtggaaatagaaaagcatatatctatattctaatggctaaatatgtatttgttgaaacatgtatattgggacaaagacataaatattagaatggaggtaatacatacatagtatcaatattgtttcaacttgatgtcctctaagctatcatccagttacccaagatgtcccattaagttgttcccggtaggtctgctttccctggaagagccgtatgtactcagcctttcctattgggccttccccacaattagaatattttgacttagtgtcctgtcccccttggacgttccaacttgacttagtgtccagtgccccttggacattccaacctggtaggtaagctaatctaacaactaactgccaaattgataatatataatctatgataatgaatatctcttttgtgtctccttcctaagccatcctcagagagtccttagcagacaaatggtagatgtatctttgggcagctgaacttttctgctttcctcaaatcagaccatatgagaggatatattctatgcatagatgtaatgctaaccttctgaatatattttgaatacatttatatattcactgttgccttataaaactgttagggtaggtctgtctaccctagcaaaagaaacacagaaatttaaatgtactgggagttatgttgttaaaaacacaagatatgttaactgcagtttgtttggttattcaataaaagttttagtttt

SEQ ID NO: 17021 - DNA, 1109 bp, Homo sapiens
aataaccaatctgaataaaacagccatgctcccaggtgcatgattcgcaggtcagctatttccaggtgaagtgcttatggcttaaggaactcttggccattcaaaggacttttcattttgattaacaggactagcttatcatgagagccctcaggggaaagggtttaagaaaaacaactcctctttcccatagtcagagttgaatttgtcaggcacgcctgaaatgtgctcatagccaaaacattttactctctcctcctagaatgctgcccttgacatttcccattgctgtatgttatttcttgctctgttatcttttgccctcttagaatgtccctctcttgggacttgcttagatgatgggatatgaatattattagacagtaattttgctttccatccagtatgctagttcttattcgagaactatggtcagagcgtatttggatatgagtatcctttgcttatctttgtagtactgaaaatttgccgaagtaactggctgtgcagaatgtaatagaagcttttcttattcttttattcttaagatcagtatctttttacagtattctttctacatgatccttttttgtacatttaagaatattttgattatattaaacaagactgctgattttgctactttttttaaggggtcttcaagtaagtaaaacatacatcgtagctagaagaaaaatgtaccttaaatttgcatcttccctctcatacccaagctgtaaacaattgaaatattttgtcttaaatcacttggttcaatacatgcttatttgttttaaaacctgtatcatcaaactctctctctaaatttaaaatgctgttgaatatgatacttttgaggagagagtgtgctcagaacttagacgggatttggtaggccaagtatgctaagtgtacaatatattttttaattttacacctgaaacaaagaaatgtggtcactaaaaataaaagtatatatgtaggaattaatgtactcttgctttgtcaagctgtttgctatagtttccaaggtattatgttactctaactctgaaaagtgatgtaatctggtagcaatgtagtagttcaaataaaggcatttacataat

SEQ ID NO: 17022 - DNA, 1600 bp, Homo sapiens
acgtgagagcaaaatgcatgtaatcaacatggctacttgctttgaggctcaccagaattatttttaagtggttttaataaaataataaaatttcccctaatcttttctgaatcttctgaaaccaaatgtaactatgttttatcgtccagtgactttcaggaattgcccattgtttttctgatatgtttgtacaagattgtcattagtgagacatatttacaacctagaagtaactggtgatatatctcaaattgtaattaataatagattgtgaataatgatttggggattcagatttctctttgaaacatgcttgtgtttcttagtggggttttatatccatttttatcaggatttcctcttgaaccagaaccagtctttcaactcattgcatcatttacaagacaacattgtaagagagatgagcacttctaagttgagtatattataatagattagtactggattattcaggctttaggcatatgcttctttaaaaaagctataaattatattcctcttgcatttcacttgagtggaggtttatagttaatctataactacatattgaatagggctaggaatatagattaaatcatactcctatgctttagcttatttttacagttatagaaagcaagatgtactataacatagaattgcaatctataatatttgtgtgttcactaaactctgaataagcactttttaaaaaactttctactcattttaatgattgtttaaaggtttctattttctctgatacttttttgaaatcagtaaacactgtgtattgttgtaaaatgtaaaggtcacttttcacatccttgactttttagatgtgctgctttgatatataggacattgatttgatttttattattaatgctttggttctgggttgtttcctaaaatatctgggtggcttaaaaaaaactctttaacttgtaataaacccttaactggcataggaaatggtatccagaatggaattttgctacatggggtctgggtgggggcaaagagacccagtcaattacatgtttggtaccaagaaaggaacctgtcagggcagtacaatgtgactttgaaaatatataccgtgggggtagttttaccctatatctataaacactgtttgttccagaatctgtatgattctatggagctattttaaaccaattgcaggtctagatacctccttctcagcactattaaagctcctaagttagaggagtgcctaaaactgagttacctaaagtttacttacattaaagtatgaatattaattttagaaatttgagactttattctgtaccagccctgtataataacaggttatctaggaccttcctctgaggtaggtctaaatactgatctctgaggcggaactaacgttttggggactcagcatctctgccaggttccaggattatagacagaagagtcctgtcataccactttctggaaaagtcctaatttcatgtaatccttttattttcaataaaaacaaatagctaaatgtataaccaactatgatgttatgttttcaataattttgtaaaacagctcatataaataaaatttttaattggaagaa

SEQ ID NO: 17023 - DNA, 2502 bp, Homo sapiens
gatctcattgaaaaaaatatatgattgtataatgtgattttttttagaatagggggaaccttatttatttgtgtgttaactgaataggaaaatgtacatactatgttcatgatagtgtgatttttttcacatttaagcaggaatgcaatataaaaatgtgaatctcttaattctcagccatgtgcttattatatttctttttagattgtctatctgtataacacacacacacacacctaagagtctctatttcacaattatatttttgtaaatagtatatgcatttttaatacattggaggctttattttgaactaatttcttagagaatagttatattttctattacacaagtttaaaaatattattaacttgtattttcttaatatacaatctatcttttccacaaatatgagtgggaaataaatcagcacatttgaaagaaagtgttaaaactgaaggcctcacttaattagaaacgtgataaatatatggacaaatggactatacatactataagaggactgtagtttaatactttttacccaaatatgtttaaaaacttcgtgcatttgttacagctcatgttttctatatgaacttagtcattaatgttctttataaaaagtgaaataagatggaaaaataaggatcctacagccagtaagtgataaatctagaaaattgagttttgagtacctcttttcccatatacaatcttccttccttaggtaatttggaagaaaactatgacccatttaatttctattgtgtttcacaaaattaagtgttgttcattatactctctgaaatataggtttaatttcaaatagaatatggacttaaatgttaatgagaaaatggctttaatcaattctagcattttattactgtaatacagggctgatagagtgattttgtcttatatgagtaagttactacttacaggtgataacttgcatactattggaagataaacttgtcaaacttgtcaagaatgagaaaagccaaattagaaaatcctatgtcctagtttccttaccaaggataattaaatatatcactaagagctttatatattgattatatattgttgacaactggtttaagcatcatagcctatgatgataaacactgcctatatatgtaaatagcttttcatcaattcttaaatttcttaacctaggcttcagggagcatatgaaaccaaaattatatggaacattttctgtgtgtacatgtacatgcatttttctagggagagagtccgtaggtttatcagaatatcaaggaaaactgtgacccaaagaagtttaagaatcacatacagtgctgctggctttttgtgcttggcaaatgagtgacaatagaagaaataatttttcttacacattttaaaacgttttctcttccttgtgattgaagatgaaaggagtaagaaattaaggcatttgtttaatttatactggtaacttatttaggggggaggggacatgaaggtaggtaaataggtaggcctctaattgaaccacctctctaagttatgtacgtatatataagctgaaattgtgtttgacattctgagggttttctttttcttttttctttttttttttttttggtggggggctgggggtcagagtcttgttctgttgcctgggctggagtgcagtggcatgatctcagctcactgcaacctctgccttctggattcaagtgattctcctgcctcagcctcttgagtagctgggactacaggtgcccgccaccacaccagctaatttttgtatttttagtagaggcgaagtttccccatgttggccaggctggtcttgaactcccgacctcaagtgatctgtctacctcggcctcctaaagtgctgagattacaggtgtgagccaccgtgcccggcccattctaagggttttctttgaagacaggtcaaatgctgttagtaagtttcaggagattgttaattcctcagttataccagattttataaaatatttgagaatagatggctaacaagaggttagaaatacttttccttaattttaatccacagtatgttacatgcattctaccactacattttggtgctatttaaggtgtgcaattttctataggtgacttttgcaattcagggaagatttgggcatattaaatgaaagaatatctaattgggggaggtgtgaagggaaagaaattcttttcaaaagctgaccacaaagagtagttaaaagtttttgtcactatcttcacaagtgtgtaaagcacagatttcaacagagtgcttggcatattgtagggtgctcaatggtggtttttattattattactcagattccacagtggcaagaaacatcattctacataatggaaaacatttacatcaaatcccacttactttaatgcgaacttggagataatttatggtattgtattgtaaaccattaatgaaaactttttcacagttgagtgaaattaaaatcactatatctc

SEQ ID NO: 17024 - DNA, 971 bp, Homo sapiens
tttgaaatggcatttaaaataaacatatcagtaagtttctatatgtatcaaaactgaaaaaatagtgttccaggctaacatacttttttaatttttattgaaagttgttcaaatataatatattttttgagaggcagtgttaatgatctaggaaaccctgggctgatagagtagaaaggaatatggctagaataacattgccaaacattaggctttatgttttgttatgtttgtgttttcgttgtataattatgaacatgcacaagtttctgcatgaaaagatattaatatattaatcacatgtatgtgccttttggttacatgcattaaatctaacagagttaaattatttcagtggctcttttggcctcttactaggggggatagtcttgtttctagcttaaacaattttttttttgcacaaaatttcatttttaataaaagtggtatcttttgactgagttattgttttgaaaatggtatataggtttccagtaggtcaacaaccatatgtaaatggtttttataaatttctcaatttggggacaagatttttttgtggtctaaattgtgggcttaagattcttttctttatatgtgtacatataatttttttttctttgccacactggagcacaatgtttctatgtaaagaattattttcattctttatccatgagcaccaggctttgctcacttaaaaaaaaattaagccacattaaggagtgagtcttcttttttacaataatgtaaaaattaaactgtttacatttttttaaagcattgtagtttttaaaaattaagctgttttgttttgtgttgttgaatttgaaagcctttgtaaatatcaatataatgtaccaatgaaataacatctggggcaatgaaaccctgatcatgttgttgatggttagcatatgtttctgaaaattaaatatgtattattaaaagttggtctccaacacttgttt

SEQ ID NO: 17025 - DNA, 353 bp, Homo sapiens
ggaaatgcagatgtacgtgacaatgagactgacctttctcaggaatatttggagctgtgcaaatgttaaaatttaaagatttgatatacatggagtgtttcttctcgacaccaaaattttcatgtgttccaacagggtgcttacatatttgtaaataagcaacttgaaagtgcctggaaaattgcaccactgtgcttggtttgtacttttttaggtaaatctatatgctgaaaagtagagctcaaaaacagtagttcaatttgcttaattattgcttaaaataatggtactatgtaaaattgtataatggaatacaataaaaggtaaaacttatttgtaattagaagtgaaag

SEQ ID NO: 17026 - DNA, 2678 bp, Homo sapiens
tggagataatttatttttaccttcactgtgaccttgagaagattcttcccattctccatttgttatctgggaacttattaaatggaaactgaaactactgcaccatttaaaaacaggcagctcataagagccacaggtctttatgttgagtcgcgcaccgaaaaactaaaaataatgggcgctttggagaagagtgtggagtcattctcattgaattataaaagccagcaggcttcaaactaggggacaaagcaaaaagtgatgatagtggtggagttaatcttatcaagagttgtgacaacttcctgagggatctatacttgctttgtgttctttgtgtcaacatgaacaaattttatttgtaggggaactcatttggggtgcaaatgctaatgtcaaacttgagtcacaaagaacatgtagaaaacaaaatggataaaatctgatatgtattgtttgggatcctattgaaccatgtttgtggctattaaaactcttttaacagtctgggctgggtccggtggctcacgcctgtaatcccagcaatttgggagtccgaggcgggcggatcactcgaggtcaggagttccagaccagcctgaccaaaatggtgaaacctcctctctactaaaactacaaaaattaactgggtgtggtggcgcgtgcctgtaatcccagctactcgggaagctgaggcaggtgaattgtttgaacctgggaggtggaggttgcagtgagcagagatcacaccactgcactctagcctgggtgacagagcaagactctgtctaaaaaacaaaacaaaacaaaacaaaacaaaaaaacctcttaatattctggagtcatcattcccttcgacagcattttcctctgctttgaaagccccagaaatcagtgttggccatgatgacaactacagaaaaaccagaggcagcttctttgccaagacctttcaaagccattttaggctgttaggggcagtggaggtagaatgactccttgggtattagagtttcaaccatgaagtctctaacaatgtattttcttcacctctgctactcaagtagcatttactgtgtctttggtttgtgctaggcccccgggtgtgaagcacagaccccttccaggggtttacagtctatttgagactcctcagttcttgccacttttttttttaatctccaccagtcatttttcagaccttttaactcctcaattccaacactgatttccccttttgcattctccctccttcccttccttgtagccttttgactttcattggaaattaggatgtaaatctgctcaggagacctggaggagcagaggataattagcatctcaggttaagtgtgagtaatctgagaaacaatgactaattcttgcatattttgtaacttccatgtgagggttttcagcattgatatttgtgcattttctaaacagagatgaggtggtatcttcacgtagaacattggtattcgcttgagaaaaaaagaatagttgaacctatttctctttctttacaagatgggtccaggattcctcttttctctgccataaatgattaattaaatagcttttgtgtcttacattggtagccagccagccaaggctctgtttatgcttttggggggcatatattgggttccattctcacctatccacacaacatatccgtatatatcccctctactcttacttcccccaaatttaaagaagtatgggaaatgagaggcatttcccccaccccatttctctcctcacacacagactcatattactggtaggaacttgagaactttatttccaagttgttcaaacatttaccaatcatattaatacaatgatgctatttgcaattcctgctcctaggggaggggagataagaaaccctcactctctacaggtttgggtacaagtggcaacctgcttccatggccgtgtagaagcatggtgccctggcttctctgaggaagctggggttcatgacaatggcagatgtaaagttattcttgaagtcagattgaggctgggagacagccgtagtagatgttctactttgttctgctgttctctagaaagaatatttggttttcctgtataggaatgagattaattcctttccaggtattttataattctgggaagcaaaacccatgcctccccctagccatttttactgttatcctatttagatggccatgaagaggatgctgtgaaattcccaacaaacattgatgctgacagtcatgcagtctgggagtggggaagtgatcttttgttcccatcctcttcttttagcagtaaaatagctgagggaaaagggagggaaaaggaagttatgggaatacctgtggtggttgtgatccctaggtcttgggagctcttggaggtgtctgtatcagtggatttcccatcccctgtgggaaattagtaggctcatttactgttttaggtctagcctatgtggattttttcctaacatacctaagcaaacccagtgtcaggatggtaattcttattctttcgttcagttaagtttttcccttcatctgggcactgaagggatatgtgaaacaatgttaacatttttggtagtcttcaaccagggattgtttctgtttaacttcttataggaaagcttgagtaaaataaatattgtctttttgtatgtc

SEQ ID NO: 17027 - DNA, 514 bp, Homo sapiens
gggaccacccccaggtttcagtgaacccttacctatattcagcatccagtagtgggaaaactggggtgggggtgggggtgggacttctaactgcatgaattaatccacaaagcggctatcttttggggtggagtagaaagggtcttggataccagcacattggagggagatagcctgacctctgtccttgctccttctccctgcagcctacgggtctgttttctgtgtgtgcccatttccttgacagctttattctttgtgaaagtggtataatttattgttaaatatttgaacaataaaaaaggtacaaaaagtgaagtacaaattacccaaatctctccacccttatataatcattgtcaaccctttgatgagtgatatttccctatacctatgtacccagatagatatatgcatagataaaagtgatgaaatataagtgctgttctatctgtattttttcaccaaacaatatatgttgtgagcttctatgtcaataaatatatatatcagc

SEQ ID NO: 17028 - DNA, 294 bp, Homo sapiens
tgagtggattgccgaagaggagctcccaccttccccactgccgtcggggggagtcttcttgtaaatatatctaattgcaataatatcttaacagaagggggtgtcaaacagaggcatcagcctgctgttgatcacagagagaaattgagtagaaagaccaaaagaatgtgacctatttgaaactttctgtcttaagatgcttcttgacatgctgcataactacataaacagcagaggtgtttaagagcccagaaaaacataatttgattttaacattaaaatttccaaaagttt

SEQ ID NO: 17029 - DNA, 1211 bp, Homo sapiens
agcattcagtggaagtatatctatttttgtattttgcaaaatcatttgtaacagtccactctgtctttaaaacatagtgattacaatatttagaaagttttgagcacttgctataagttttttaattaacatcactagtgacactaataaaattaacttcttagaatgcatgatgtgtttgtgtgtcacaaatccagaaagtgaactgcagtgctgtaatacacatgttaatactgtttttcttctatctgtagttagtacaggatgaatttaaatgtgtttttcctgagagacaaggaagacttgggtatttcccaaaacaggtaaaaatcttaaatgtgcaccaagagcaaaggatcaacttttagtcatgatgttctgtaaagacaacaaatccctttttttttctcaattgacttaactgcatgatttctgttttatctacctctaaagcaaatctgcagtgttccaaagactttggtatggattaagcgctgtccagtaacaaaatgaaatctcaaaacagagctcagctgcaaaaaagcatattttctgtgtttctggactgcactgttgtccttgccctcacatagacactcagacaccctcacaaacacagtagtctatagttaggattaaaataggatctgaacattcaaaagaaagctttggaaaaaaagagctggctggcctaaaaacctaaatatatgatgaagattgtaggactgtcttcccaagccccatgttcatggtggggcaatggttatttggttattttactcaattggttactctcatttgaaatgagggagggacatacagaataggaacaggtgtttgctctcctaagagccttcatgcacacccctgaaccacgaggaaacagtacagtcgctagtcaagtggtttttaaagtaaagtatattcataaggtaacagttattctgttgttataaaactatacccactgcaaaagtagtagtcaagtgtctaggtctttgatattgctcttttggttaacactaagcttaagtagactatacagttgtatgaatttgtaaaagtatatgaacacctagtgagatttcaaacttgtaattgtggttaaatagtcattgtattttcttgtgaactgtgttttatgattttacctcaaatcagaaaacaaaatgatgtgctttggtcagttaataaaaatggttttacccact

SEQ ID NO: 17030 - DNA, 1403 bp, Homo sapiens
aatggaatggaactagaagtgcactgactgacagcatgttgcaatcacagataaatgtagcctcataactgtgcacctgaggagggatgagaagctactgctatctgctgctctgggaaatgagatggtttggccatgcaccacctcagatctccaaactgatgtccctgtgaacacctgcactatgagaaggtttcccaacaagagtgtatcatgatggcattccacgagattttataaccagagtctagcagtgataaaatgtacaatttacgctctgaatagaaacatgacaccaaagaaagggcattgccatgacatctcaaagcaacaggtaattgaagtggctgagtggataccacgttgtgaggtcagccactgggtcacttgtagtcaatgcaaagcttgcacaaaccaacgtcagcctagtttcactcagtttgacctgagactttccaatacaatctgttgttttgttttgtttttagagacagggtcttgctctgtcacccagactggagtacaatgacacaatcatagctcactgcagcctttaactactgggctcaagacatcctcctgcttcagcctccagagagttgggaccataggtgcacaccaccacacctagctaattttttggggaggtcttgctatgttgcccaggctggtcttgaactcctgggctcatgcaatcctcctgccttggcctcccaaagcgctaggattagaggtgtgagccgctgcaccctgccccagtacaatcttttttgaactcaaatttttgctgacatctgagtgcacacaccacagtgtaaattatgccttatcagaatctaaatgaaaatagcgaacatttaaaagctatcaccattgtagtagaatcatccttcttttttgaaatttgaagcatcccaggcttaaaatcttgtgtttcagaaagacagtttataccatgactgcttaattatccccccaaagaccttctgattgaagtcatgtacagttcagtggcctaaattctctgcctttttaacttgctttgcaagcctactctgaaaataagttatttagtcaagttattctcaaagatgtcccagttgcctagaaaggatcaaatggaacatttgacacacatactcaaaaaaatgtaactgactataaacactttaacctaatcatctgtatcaaactttctaaaaatcaaatctcaggattgttccactttagagattctatgtaaagtttatataactatacttgtcaaatagcacctatctatgcatttaaaaatgcattaatatctaacataaaattgttaatttatacacacacatacactcatacatagagagagattttcggtatgttgcaagtattttttccgattaaatttattttcc

SEQ ID NO: 17031 - DNA, 271 bp, Homo sapiens
gttatttcctaggatttttccccctgtgaacaggcatgttgtattatataacatatcttgagcattcttgacagactcctggctgtcagtttctcagtggcaactatttactggttgaaaatgggaagcaataatattcatctgaccagttttctcttaaagccatttccatgatgatgatgatgggactcaattgtattttttatttcagtcactcctgataaataacaaatttggagaaataaaaatatctaaaataaattttgtctgc

SEQ ID NO: 17032 - DNA, 1159 bp, Homo sapiens
ccccgggtacagtttaaagaagctggccataagaaaaatatatattgatgtgtttgtcacctccctactcctgtcattacatttactttattaaaagcaaaataactgttgtgctgtttccatcttccttgccaagttttcctaccccttctaccctctccttaaacatcagaaaacaccctctatgaaatcaaatgtactgtacctgggttacttgcaaaaattactaatgcttcagtttttctgttgtatttcatttccagttttcaggcagttatttttattattgtactttaagcttttaagatgaattgttatacaagaggtgcttatgcttagcttgatgaccaggatgttatttttaacaaaatgattgctgaagtgtttcatcctggctggtccttcacttgtgttggatttagaagtgaatgtgtttggaatatggcctacagagaatagaaacaaatccatgtaaacaattttgaaggaggcatgggagctaaaaatcctgtgatactaagatctcagtcatatgaattacaacgtagtatttactggcaagaaggagaaagttgaaggactcagctaaaggagtacagcaattgtagtaactgacacatcctctctttgcaagctgctgactgggcacactcatgccaagtttcagaattattggtcttctgggtttttgctttttaaaagaggtgtgggagcagaggaatggaaacaatcgtgagtttttgagctagggaaagttggagctcctttaatctttttaaaggatcagtgctgccctaagtgaataaactcaattgtccatctttattttagagttttaatgaattcaaggaagggagcatagcatatctgtggcaaactattttccactcaaatcctgagttattgctgcatgctttaatttcttccctttcagcatctgagaaccttaaagccaatgtctgcgatctttttttggatatttatacttttagatatatagtacctttaagtagcagtatgggacaaggcttgtaaatgttttgtctaatgttctattgtcaccttttatgcatttatcacttccaaatctaactttgcacaagtaacccatgtaaaaaaaaatgtacatttttcaaaagttgtaaataaaaataacctt

SEQ ID NO: 17033 - DNA, 121 bp, Homo sapiens
ggaagcattttcctgattgatgaaaaaaataactcagttatggccatctacccctgctagaaggttacagtgtattatgtagcatgcaatgtgttatgtagtgcttaataaaaataaaatg

SEQ ID NO: 17034 - DNA, 107 bp, Homo sapiens
tacttacaggatgtcttaggattgtttttctcatcaggatacattaaaaatacaatacagcacgtcaaaccacagaatatttattgagtaataaacttgtggcacac

SEQ ID NO: 17035 - DNA, 60 bp, Homo sapiens
gccgaccactccagcatggtacaccggtgtgaagaacaataaagagactctcagcagatc

SEQ ID NO: 17036 - DNA, 240 bp, Homo sapiens
gggatagcctctgtgccactttttgccagagtgtctttgagccagattcatattttgcatagcaccccatcaaaagtagttcatcaaatgtctattaaacgttttaaagaaaagtacatcattgacccatttttagggcacttgtaaaaatgtttctataaatatgtgaagggtatgtacatttgttttgtgtgtcacatggggtcagtaagttctcaataaaaattgttaagaaatgcc

SEQ ID NO: 17037 - DNA, 2962 bp, Homo sapiens
actcctttgaaatactagaaagttttgttttggatgatggggcaggggtttcagaagatctgtaaaacaaattaaggtgcgaacaagttaatttgatctgccacattatctgaaggaagtgtagtgggatttttgttgataatttttagaagcaaattttcctgaaagttttgagtagaggtgagaccccctccccaagtatctgtttatatagttagttttcagctcatttaaaagaggcaaaaattaaaagcttggagagatagtttcctgaatagaatttgaagcagtctgaatgttctttgaaaataactggagttattagcataccctagtacatcttacagctttccccttccatgttagcactttactgctgaattctcaattttcttaacattgagacaataaatgtgtgttttgtcttgtatatggcataaagagtaaataagttttagagttgttctggaaaatgtcagaataagtcagtacttgggttgtgtaatctgctagtccaagcgaacagcaacctcctgctaccctccctctatgaaaatagccatgcagacaagtctctcatctgaagaacaaattagatttagctaattagaattaatcctggctttcattgccatagtctgtaaaagactttggtggctagaccactttataccttcgcagtgtggtctctgggggcaaaaaactaatgaaaacaatctctgtaatggcagataggaggagatgaaaagttctgttgcatggatttttaattctctggctaccacatagtagagaatggaatgaagatttccttttggcttcttaaggttaaaaatattcccatgaacatgaaaattttcaaattttgaatctgaaagccaccaaatgtatctttatgtataaatccttgtaaatgatagattccatgggtgagactttacatattttgggtgggaggctactggcatatatttttaaatgttcatattgcgtagaatctccactaggaagtctttatttgaaatagttgaatcagtgatctagtattttcctttcggcaagatttgttaggtttttaccccttctaaaataagttttattccatctgcaaattgctgcaatattatagtaatcagaaactacataaggaatgttatataggcttgtcagttcccatttttcttgacaacaataaataccacttttaaaaatgacacatatttaaacacttagaaaataaagttaacacttactgaagtgctagtactaaactgtgctagtactaaaagaaaacaggttggaacatacatatagcctagcatttataacagaattgttgaacgtctgtaaatgattttttttttttttgcaaaggaaaaaattgatactggaaaagattgttgtgcatagttattagtcatttgtaaccttgcttaagtatttcttagtccaacatagatattttctttctcctgaccatgtattttaaaatatagtctatttcttgactttgaacttaaagctttaatcataatttctcatgtatacatcgttcttctgatggtaagctggatttgaaggtagtggtttcagtgtttcttaagttggtagctgagggtatcaggcatcagttcatgcaataatacaagaaaaaaaatcctttgcttgccaagaggtagagtgatgtgcatttatctgttttctgttctgtaagtctagaccttcaaaccatttgtaaactaacccctgggaaatttgaaattacctgataacttaagactctgtgatctctggaatcaccatatgtttcttttttgtgtagatattaataacattactctttgactatagtgtgcactctgaaatgtactcagtgaaaatttgttttgagtttcattaatgctatttcaccagttagacataattacttctaccgatgtgaatgatacggatgccggcagagcttccagatctttcagactcaactgctaggtcaattagtttgtcataataaaacttggcagattctacaagtctattatgacaaaccaggaactaattctataatggaaaactatccattctgaataataggtatgtaattatttgctgctgctgctgtgctctgtaaattctgaatatgacatttaaactctgtgcctactaaaggtatcttctggagtttttgggaggagagaaactggaaaattaaattgtatttttgccagaagactcttacttgcatgtgtctcagggtcttcagtttttctataagtttccatatccaaagttcagaattcatgtgaaatacttctttggggcaaaagtccttcattcctggtatttattggattggaaatctgtagcaagatgctgtttaaaattaccatattgtttttttatcttatacttagctctctggctattgaacttccttttcttgtttgaagttagcttcaaatttgctcctatgctaaattacctgtaaatattctggataggaactacttgaaatagtaatttgttaaaagatatgacaaaatgaaaatgcttaaactacagaaatttaaaaatgccataacaatcttgcgagactaactttaaaatatactttaaatgattattatgattttggtggtaacgatcccccacacacaaccactatgaagaaataatgccgcatttttcccccattgtaccaaaaagataaaaaaatggtaaacactgatcaaggtattttgtattgtcaaggcatgcatattctaaagaattaaatgctaacttaacagcactggctttctggctggtcaactatatgaaaccttgttcattcctccgagtactgtaatgttcacacttgtacaatcttccctgtcatgactttaagttctacttttcattaaccatggcctgatattagttcttagagcttcttgtggcaaaaataaaatgatttaattct

SEQ ID NO: 17038 - DNA, 2733 bp, Homo sapiens
gaacttcagggggccattcttaccagttctgtttctgttttatctcatggtatctctggtagcacctgaattctttttcttcaattaggacacagccagatggacatctaagacagccgatcatctttccttgcctatgacatgtgtataaaatgacattgtgggagctgttcgattttttaaaggtagtgtctcctgatgacaaacagagtatattaatttcctttccctccacttaaaactaaagcctgttcttgctgctggtaatctccctgtagcgtaaacatagtatctgataaaatttacaatagccacgcaatagccatcaaggagaatttctattatgattataaattcatcatgttttctaaaattctgttggttttagaggtcagattcctcccaaccaggctaataacctaacacatgtttaaaaaaaatctgcctaagccgggtgtggtggcatgcatctgtagtcccacctattcaggagattaaggcaggaggatcacttgagcccaggaggtcaaggctgcagtgagctgcactgcattccagcctgggtgacagagtgagatcctgtctctgaagaaaaaaaaaacctgcctggcaaggtccttccctgggaatcaccactcggtccaacctagacaaccaagaccgctatacctaaagacctctatatcctggtgcctaagaaacttctgcctcccacagacaactaagtgcttattcaaagactaggttattttcaactgggaaaaaagcagtgctaacaggatattgttctgggatagagatgaagaccgtccttgtgactttttaaagaggtggggctcactgcaactggggagaacacttagcatatggatatgattggtgtttgattccttgctctctggtgtaatcgtctaaaggcaaacattcctgcaaacaggtttttctcagcttcaggcagaggagacaacatggaagaagattcccaccagctaattcttcttgggctatttgtttgacagtagcatgatgttttttgagaccatcaggggtggttacatagaccagcagctacagctctggaaattgaaatcataatctgtcaatgaatacatgacaagacagaacgttccttgccaggccaggcaaaagccaaggcccattagccagtttagcatttactttaaaaatgacatgaggcagattcttatccaggatgtggatcagccaggtcactttgtcttatctttggtcacctgatcactcaactgcttcttaacacctccaccagggggaaggctggcacaaggagaaaaaaaaagcaagcatcagcgaatagtatagtgtctcagggtccgaagcaagtttaaatgccacctaggaggatccaaagtctgaatctcctctacaatgtttcctttctcccaaaacagggaactgactgtctggtagtgaagacaagcaagtggagaagttatacgatatagtttaatgagagttaaaaaactagtatgtggaaagctatgggaatatgaggaaaaatatcttgagctaagaaagtagcagaggaaatttcacatgcaaagccacagtcatgaagagaccatggtgtgtctgggtaactgtgagcagtttatgtaactggaatgaaaagggctcagaggaatggcagggatggcaagagatccagctagagaggtattcagggatggaaagaggactttgagttttatccaataggtgaaaatgagtaattaaagcattttaatcagggaggctctgtgatcacatttgtgttttattttattttactttattatttatttgtttatttttgagatggagtttcgctgttgtcacccaggctggagtgcagtggtgtgatctcggctcactgcaacctccacctcccggattcaagtgattctccagcctcagcctcctgagtagctgggattacaggcacacaccaccatgcccagctaacttttgtatttttggcggagacagggtttcaccatgttggccaggctggtctcgaactcctgacctcaagtgatccgcctgcctcagcctcccacagtgctgggattacaggcgtgagccaccgcacccggcttgcaatttagaaagggcacttggcaaccactatgtgaagggtgattggagaaggacaagactgtggaatggggaataaggaaggaggagtttggagaatgactccaaaggtttgagcttggctagaaccggtaagatggtgacattgttgatcaagactgggaatataagagagaagcaggtttggagagatcaattttgaacattttagacatgattttctattggtcagacattgatgtggagatgtaaacacatgtagggttggtgagaaggaaagatgagaacaaaagcaacattgggttaagggaactcgcttaagaaattttaagctatttaatcttgggaactgaagccagtcatgtaaacatactataccaatctagtccctaacagtgttttttctcttgtggcagaaagaattgctgttcctctttggaatctccttcccagacaccttcaaagtcttattgacacagtaaagggaggccaaccactactaacaagttctagaagatataggatcttctatagtaggttaatggaaaatacaaaaacaaacaaacatacaatgaaactgcctcctctcaacccattttcttaacaaattcaattttc

SEQ ID NO: 17039 - DNA, 119 bp, Homo sapiens
gcctcagaaggaatgcacttgggctaaatatggatattgtgctgtatctgtgtttgtgtctgtgtgtgacagcatgaagataatgcctgtggttatgctgaataaattcaccagatgct

SEQ ID NO: 17040 - DNA, 579 bp, Homo sapiens
atggatcatggctgacttcctcactaacctcttcacgtgtaacttctgcagacctaccacaagtttacatgtaaccacagaaatccctttctctcctgactcattactaatggataccattctcaacaagtcaatccaaatcagcccgttaaggagaaagaaattaatatacaagctgagtgtgaaagtagaaatcacctacaccagagagctattttggtattttgcctttaaataaaaagcctcctccatatggctgtgcagccttgctctgtggcttttcccagcacaatcagtgctagtgctggggaagggacagtcaagagcagtcagttgcttacttattttgctctggatgagtctgggacacgctgtaactttaacacatttaagaagaaggtgtgtggccttttcagaaggtggcatggtcctcaagtgagttcttagtattttatatcagcaaaataactcaattttgcagattgcaaacaaatataaaagctgtttctgtttatgaattttattcttttagaatagaataagtacatgctgctgtaataaaattgcctttaatcactt

SEQ ID NO: 17041 - DNA, 2203 bp, Homo sapiens
atcccttcccactggaggcatgtgatgagaggaaatcaccgaaaacgtggctgcttcaaggatcctgagccagatttcactctccttggtgtcgggcatgacacgaatattgctgatggtgcaatgacctttcaataggaaaaactgatttttttttccttcagtgccttatggaacactctgagactcgcgacaatgcaaaccatcattgaaatctttttgctttgcttgaaaaaaaataattaaaataaaaaccaacaaaaatggacatgcaagattccagtatgcgaaaaaaaatcttattaagtcaattcaacaaaagccattctttgataccactgcagagtatataaacaccatgttctttaatacacacacacacacacacacacacacacacacacatttaaattccaattcagcaaagaggcccatctaagctaaaaaaattaattcttcctgattaaaaagaaaaaatctgtctcccagtgtttgggaagacggactggcatttcttctaggatctgctgaccagatgtttttggtatttcctgttggtggtgatgttctgtgcactctatttcctttcaatgttgctgaaatgtgtatatctttagaatgtaaatgcaacacttaagaaaattcaaacactttggaaaagggactaaacagtgatttctctgtgttcttgaaatggttttgtgaaaatgctttgataacttcccactcaaagaagagatttacagagctttcgaaattgactttgtgtgtagcaagggacggggcactatcaggatacctcttggtgctttcctaaaatggatcccggggctttccaaggagcctggaatttcagctcacagatctgtttttcttgcttcagtgtgcattttaagtcaatagagctgagtatctagcattgaggtgagggaaatgctgcctatactcccagatgtgtttagaatatctcagaaacaacactgtgtttagctcggctttctctgctaagtatgcctttcaagtgtacaccacggagacaggaccgcgttgcaaggcgggacagcaggttcagaccacagttctcagtctgactttactcttgctaggtctgtcctactagctgttgcctgctaccgcccatggctctccatcggactgcatgtgtccttttctagtttgcaaagactaaaatgcattcccaaacctactgctaatctgagggcctcagcatcacttccagatccttgcttggagcagtctctctattgactctctcagatcgctccactgctccatgggctatcaagtaactaactgcatacctgccgttggcatcatcagaacagtccgaagaaatagtctccactcactaattacctcctatataacgacgtatgcttcctgtagttcagtagtttgctctcatcgataacgtgcattgggaagtttccagactgcaaaaactaggagctcgcattcatttcccaagtgtgacccttagatgcttagttgactcgctgcatatttgctcttgtcttcagaaaagaaaggaagaagtatcgttccaacgaaatgtttccagaaaagtgtactataaactttcattccaaaaatggtgtcataagcaaacaactcacttgtcaaatttcaaatggtattgaacaaaaaaagaaagctgttgtgtttttgttttgttttgttttcatgaaactgtgattttcaacttatgaatgctataatgtcccagcgcgggaagctcacgctgtgtgaacatgaagttgtataaaacaaaccaaccaacctacacacaaatgttttcataggcactgtataaagaaaaatgtatgtttattaactcaaatcagtttttcagagaggaaacgtcactgagatgaagaggcgggtaaattggtttgttattttttaaaaaaaacttgcatgtttaaaaaaaagttgattgcttcaaatttctgctactaacttcaagctatgggagtttggcagtagtcacttgaggattttttttccaattcttttctttttgttgttaaagctgtacttcagtgaacagaaaaattgccaagcaaactaatggctataaaagcgtaatttgcatgtgtgggcataaactacagagcctcattgccatgaggtattgtacaaagttttaatacattttgtaaataaaattgtaaagaaagaa

SEQ ID NO: 17042 - DNA, 6790 bp, Homo sapiens
tctaactctatagtaggcatgttatgttgttcttattaccctgattgaatgtgtgatgtgaactgactttaagtaatcaggattgaattccattagcatttgctaccaagtaggaaaaaaaatgtacatggcagtgttttagttggcaatataatctttgaatttcttgatttttcagggtattagctgtattatccattttttttactgttatttaattgaaaccatagactaagaataagaagcatcatactataactgaacacaatgtgtattcatagtatactgatttaatttctaagtgtaagtgaattaatcatctggattttttattcttttcagataggcttaacaaatggagctttctgtatataaatgtggagattagagttaatctccccaatcacataatttgttttgtgtgaaaaaggaataaattgttccatgctggtggaaagatagagattgtttttagaggttggttgttgtgttttaggattctgtccattttcttttaaagttataaacacgtacttgtgcgaattatttttttaaagtgatttgccatttttgaaagcgtatttaatgatagaatactatcgagccaacatgtactgacatggaaagatgtcaaagatatgttaagtgtaaaatgcaagtggcaaaacactatgtatagtctgagccagatcaaagtatgtatgtttttaatatgcatagaacaaaagatttggaaagatatacaccaaactgttaaatgtggtttctcttcggggagggggggattgggggaggggccccagaggggttttataggggccttttcactttctacttttttcattttgttctgttcgaattttttataagtatgtattacttttgtaatcagaatttttagaaagtattttgctgatttaaaggcttaggcatgttcaaacgcctgcaaaactacttatcactcagctttagtttttctaatccaagaaggcagggcagttaacctttttggtgccaatgtgaaatgtaaatgattttatgtttttcctgctttgtggatgaaaaatatttctgagtggtagttttttgacaggtagaccatgtcttatcttgtttcaaaataagtatttctgattttgtaaaatgaaatataaaatatgtctcagatcttccaattaattagtaaggattcatccttaatccttgctagtttaagcctgcctaagtcactttactaaaagatctttgttaactcagtattttaaacatctgtcagcttatgtaggtaaaagtagaagcatgtttgtacactgcttgtagttatagtgacagctttccatgttgagattctcatatcatcttgtatcttaaagtttcatgtgagtttttaccgttaggatgattaagatgtatataggacaaaatgttaagtctttcctctacctacatttgttttcttggctagtaatagtagtagatacttctgaaataaatgttctctcaagatccttaaaacctcttggaaattataaaaatattggcaagaaaagaagaatagttgtttaaatattttttaaaaaacacttgaataagaatcagtagggtataaactagaagtttaaaaatgcttcatagaacgtccagggtttacattacaagattctcacaacaaacctattgtagaggtgagtaaggcatgttactacagaggaaagtttgagagtaaaactgtaaaaaattatatttttgttgtactttctaagagaaagagtattgttatgttctcctaacttctgttgattactactttaagtgatattcatttaaaacattgcaaatttattttatttatttaattttctttttgagatggagtcttgcttgtcacccaggctggagtgcagtggagtgatctctgctcactgcaacctccgccttctgggttcaagcgattctcgtgcctcagcttcctgagtagctggaattacaggcaggtgccaccatgcccgactaatttttttttatttttagtagagacggggtttcaccatgttggccaggctggtatcaaactcctgacctcaagagatccactcgccttgccctcccaaagtgctgggattacaggcttgagccaccacgcccggctaaaacattgcaaatttaaatgagagttttaaaaattaaataatgactgccctgtttctgttttagtatgtaaatcctcagttcttcacctttgcactgtctgccacttagtttggttatatagtcattaacttgaatttggtctgtatagtctagactttaaatttaaagttttctacaaggggagaaaagtgttaaaatttttaaaatatgttttccaggacacttcacttccaagtcaggtaggtagttcaatctagttgttagccaaggactcaaggactgaattgttttaacataaggcttttcctgttctgggagccgcacttcattaaaattcttctaaaacttgtatgtttagagttaagcaagactttttttcttcctctccatgagttgtgaaatttaatgcacaacgctgatgtggctaacaagtttattttaagaattgtttagaaatgctgttgcttcaggttcttaaaatcactcagcactccaacttctaatcaaatttttggagacttaacagcatttgtctgtgtttgaactataaaaagcaccggatcttttccatctaattccgcaaaaattgatcatttgcaaagtcaaaactatagccatatccaaatcttttccccctcccaagagttctcagtgtctacatgtagactattccttttctgtataaagttcactctaggatttcaagtcaccacttattttacattttagtcatgcaaagattcaagtagttttgcaataagtacttatctttatttgtaataatttagtctgctgatcaaaagcattgtcttaatttttgagaactggttttagcatttacaaactaaattccagttaattaattaatagctttatattgcctttcctgctacatttggttttttcccctgtccctttgattacgggctaaggtagggtagagtgggtgtagtgagtgtatataatgtgatttggccctgtgtattatgatattttgttatttttgttgttatattatttacatttcagtagttgttttttgtgtttccattttagtggataaaatttgtattttgaactatgaatggagactaccgccccagcattagtttcacatgatataccctttaaacccgaatcattgttttatttcctgattacacaggtgttgaatggggaaaggggctagtatatcagtaggatatactatgggatgtatatatatcattgctgttagagaaatgaaataaaatggggctgggctcagtggctcacgcctgtaatcccagcactttgggaggctgaggcaggtggatcacgaggtcaggagatcgagaccatcctggctaacacggtgaaaccccgtctctactaaaaaacagaaaattagccgggcgtggtggcgggcgcctgtagtcccagctactcgggaggctgaggcaggagaatggtgtgaacccgggaggcagagcttgcagtgagccgagatctcgccactgcactccagcctgggcaacagagcaagactctgtctcaaaaaaaaaaaaaaaagaaataagaaaatgggaagcaatatttgacatagttctttttagtcaaatctacttgttaaaaaaagggtagcagtttattcatctgtgaaaggaaaataatacttatcttacaaggttgcaagagctcaaggagaccatgtatgtaaagttcctgctgtaaatatgaactcccatcctaatacccttttacctctctgtgggtttgtcttgacctggaaatttgggctaaaacttagaaaaaattcttacatgataactcagtgatgcttactcatagtttttggtgtttctcatagataagatataaatcagctgggcgcggtggctcatgcctgtaatcccagcactttgggaggccgaggcgggcagatcacctgaggtcgggaggtcgagaccagcctgaccaacatggagaaaccccgtctctactaaaaatacaaaattagctgggcgtggtggctcatgcctgtaatcccagctacttgggaggctgaggcaggagaatcgcttgaacccaggaggcggaggttgtggtgagcgaagatcgtgccattgcactccagcctgggcaacaagagcaaaactctgtctcaaaaaaaaaaaaagatataaatcacaataaataaataggtcaatacaaatgttagccaggcgtggtggcacatgcccatagtcgcagctactctggaggcagaggcaggaggatcacttgagcccatgaatttgaggcagcagtgagctatgattgtgccactgtactccagtctgggtgacagagtgagaccccatctctaaataaataggtcaaacccttaaaaatatttaaattcttaaaaaattgaaaagattattcttctcaaatttagttgagctttctaagagaagcaattggctttttcccacttcaataatcattttcagtttgactcatacagttaacacaatgtgaatttcttcctcagcataacagagttatagaatgacagggctggaagtgaccttagagagtatccagttctttcattttacaggtgaggcaactgagactcaaaggtgatgtaatttgtgcaaagattatagctaattagtagcagagccctgactgggacatagtttgaaggtgaaaaacttcaccaagctacctttcttgaaaggtccaaatgtttatgttttcaactactctttccactgtaccataactttcactacatattaaatgacactttataactaatataataggacaatcatcaatgcatatatagccagcccttcatatctgtgggttttgcatccatggattcaaccaaggaggaattgaaaacactgagaaaaaaaaaaaagaccacacaataaaaaaaaaaaatacaaaataatacaaagaaaaagccaaaattgtcatactgttgttaagcaacagtataacaactatttacatagcattaaggttggtgcaaaaatgcaaaaaaaaaaaaagcaattatttttaaaccaacctaatatattgtattaggtattaaagtcatctggacatgaattaaagtatatgatgccagcctggacaaaaggcaaaaccctgtctctacaaaaaatacaaaaattagctgggcatggtggtgtgtgcctgtagtcctggctactccggagcctgaggtgggaggatcgcttgagtctgggaggcagaggctgcattgagctatgatcatggcactgcattccagcctgggtgacagtgcaagaccttgtctcagaataaataaagtatgtgatgaagatgtgcatacattatatgcaaatactgttttttttttttttaatttaaacagtctcactgtgttgcccaggatggagtgcaatggcacaatcttggctcatggcaaactctgcctcgcaagcagctgggactacaggcatgctccacggtgcccagttaattttttttgtattcttagtagagacagggtttcaccatgttggccaggctagtcttgaatttctgacctcaagtgattcatctcccaaagtgctgggattacaggcgtgagccaccacggccggctaatttttgtattttttagtagtgactggtttcgcggtgttgaccaggctggtctcgaactcctgatctcaggtgatctgcctgcctcggcctcacaaagtgctgggattacaggtgtgaaccactgctcccggccttgtgtgattttatctaagggacttaagcgtcctcaggtcctagggggtcgtgaaaccaaaaccccagggatagcaagggacaattgtatcttcaaagtagacaaatggcgccgggcacggtggctcacgcctgtaatcccagcagtttccgaggctgaggcaggcggctcacctgaggtcaggagttggagaccagcctggccaacatgctgaaaccctgtctgtacaaaaatacaaaaatagctgggcatggtggcgcatgcctgtagtcccagctactagagcgactgaggcaggagaattgcttgaacctgggaggcggaggttgcagggagccaagatggcgccaccgcactccagcctaggtgatagagtgagactccctctcaaaaacaaaacaaaacaaaaaaattagacaaatgctacattaatgtttgggtggtcagattctactttgaatctgaagtttgcagatatgcctatagatttttggagtttaccactttcttattctgtatcattaatgtaatattttaaattactatatatgttaccatttttctggatttagtaagaaatttgcagttttggtttgatgtaacaagggttttaatgtaatttatgttagattttgcatttttttcattactgttatattttaacctgactgactgatctaattgtattagtattgtgaataatcatgtgaaatgttttgagacagagtactatatttgtgaatataattttatggtttttttcacttagaacctttctgtgtggaaaactaagaaaattgctttctgctgtataatctggcattcattgtagattaaagcttatttttctgtgaataaaacgtattcaataaaatactattctttaaaatt

SEQ ID NO: 17043 - DNA, 2056 bp, Homo sapiens
taccagtacacaattaaatctgtggtgaagtcattttctaagtggaagaggaaattttaaagtgtggtagatacagtgaaattctgtacagatttttctctaaggagaatatgacatgcttatgcttaccaagatcaagtgcattgaggggcagttttgtttgcctgaataaacgtaaaggacaagtaaacaatttgatgataagctacagtttttcttagaaagtaaatattttatttatgcgctgttagttggcttttgaatcgattatttcatgcttttttttaaaaaaaaaaaaaaacaaaataacaatctgaagaggcatttggtacagatatgaattctcttacatttatttactggttgtactaaataatgatgacctctgctggatttctgtttacatccagaaaacaatgttaaggatgtatttattcccctaccctgaagaaagtgtaggatagaattgtttttagcattctaaatttaaatgcttaaaacgtcaatcaacaaaactttgttttaaatattgtaattgtggagaaaagtaaacttataagcagaacttttacaattttttcatctaaaagtattttaagatatttttaaaatccaagagcttctctatacttttcagaaatatccagatgcagtgaactgccagaaggtaaccagtctcaaacatgcttatcccattatcaaccctgaaagtttgcttgtcctttaagataaaaatgtaatgttgtgatattccttccagtaatgccactgtattttgtctccaaataaaagaagcttattgtagtatgtttgcagaaaaattctaaacaaaaattatacagcttattagagtgtgggaatagggatctaaattttaaataaaattatatatatatataaattggtgctgattttataattgcgcagtttgtttagttttttcttacttttaaattccaacttaaaattatgaggtttcagaaatatattgaaagtttaacaatgtttaaaaatagaaaagcatgagtgttcatgctttaaaatgatttttaaatttgtattttatattgttttatctatctgtctttgcaagcagtcttcaggttaaagatacttctaacaggttacagtacatttcctctgtatgtaaattagatgggataatagaattcataacccataatattctttgaaagctaagctttaaacttcattttatgtcctttcacaaataaattagtttaaaacagaaagtggctacttgccattttgacatcaactcattttgcgaggcttaggcagctagacatcgtttaaaacaaaatattaacttatattacatgtgtatctatctattgtcagtcgtctctcagttcttgaggtatattattttaatcattccatgccttaatatgcttgcaatacaagaatatcttcagatgggtgaataccaaaaggctttcagtttttagtcagaaatcaagcattgggctgtggtagccaaaaaccataggttagctaaaaagatcatgatacaattattttattaagtcatggttaataacaaatgaatccagacttgtctaacagattttccatcaacaaatattgttatgtgcaaaagtattgcctatgttgttttacacaccactgcattaactagaactgctgagaggactgtatatatgattttaaacctaagttgattttttttctcactcttgaaaggagtacttctttgtgaaagcagttcttacagctttgttttcaaccagctaaaaatgttttatatattactctaacctgttgtcctccacattctattgtcctaattgtactgttttctgatttgtatttatgtcttgagacagtaactttttgaataaaaataaacctacagtatgttgtatgttttctcttgtactcaaagggggagggtggctataaatggtttgcaaatttatatctattatcacatcttttaatgtgtttggggaataatttatagagaataccatcagtttatatttttaataaatcatatgtatttacaatg

SEQ ID NO: 17044 - DNA, 1763 bp, Homo sapiens
agaaaaataaaacaccttgtactttattttctataatttaaatatatgctaagtcttatatattgtagataatacagttcggtgagctacaaatgcatttctaaagccattgtagtcctgtaatggaagcatctagcatgtcgtcaaagctgaaatggacttttgtacatagtgaggagctttgaaacgaggattgggaaaaagtaattccgtaggttattttcagttattatatttacaaatgggaaacaaaaggataatgaatactttataaaggattaatgtcaattcttgccaaatataaataaaaataatcctcagtttttgtgaaaagctccatttttagtgaaatattattttatagctactaattttaaaatgtcttgcttgattgtatggtgggaagttggctggtgtcccttgtctttgccaagttctccactagctatggtgtcataggctcttttgggatttttgaagctgtatactgtgtgctaaaacaagcactaaacaaagagtgaaggatttatgtttaattctgaaagcaaccttcttgcctagtgttctgatattggacagtaaaatccacagaccaacctggagttgaaaatcttataatttaaaatatgctctaaacatgtttatcgtatttgatgctacaggatttgaaattgtattacaaatccaatgaaatgagtttttcttttcatttacctctgccccagttgtttctactacatggaagacctcattttgaagggaaatttcagcagctgcagctcatgagtaactgatttgtaacaagcctccttttaaagtaaccctacaaaaccactggaaagtttatggttgtattattttttaaaaaaattccaagtgattgaaacctacacgagatacagaattttatgcggcattttcttctcacatttatatttttgtgattttgtgattgattatatgtcactttgctacagggctcacagaattcattcactcaacaaacataatagggcgctgagggcatagaagtaaaaacacctggtccctgctctcagttcactgtcttgttggacgagaaaacaataacgataaaagacagtgaaagaaaataacgataaaagacagtgaaagaaaataacaataaaagacaaggaaaaaataacaatgaaagttgataagtacatgataagcgaggttccccgtgtgtaggtagatctggtctttagaggcagatagataggtcagtgcaaatactctggtccatgggccatatgaaaaggctaagcttcactgtaaaataataactgggaattctggattgtgtatgggtgttggtgaacttggttttaattagtgaactgctgagagacagagctattctccatgtactggcaagacctgatttctgagcatttaatatggatgccgtgggagtacaaaagtggagtgtggcctgagtaatgcattatgggtggtttaccatttcttgaggtaaaagcatcacatgaacttgtaaaggaatttaaaaatcctactttcataataagttgcataggtttaataatttttaattatatggcttgagtttaaattgtaataggcgtaactaattttaactctataatgtgttcattctggaataatcctaaacatatgaattatgtttgcatgttcacttccaagagcctttttttgaaaaaaagctttttttgaatcatcaagtctttcacatttaaataaagtgtttgaaagctttattt

SEQ ID NO: 17045 - DNA, 2281 bp, Homo sapiens
ggcttttactgttctctgatattctagaagcagacgatctcgggctccaagtatttcagaatgatttaaaaagtcatgccacaggaagggtctattgcagaatttcaagttctgtttatagtaaaaaggaagagcgtttcctaatccctcctttaccatatcctacacagaaaaatacttttagacttatattgccaagccaaagttaccatattttggtgtttttgtgttttctctttataaggcaaaaagatctgtatttacactccttcacctagggatgtgtttgttgccctcctacccaattgtcatgattgtccttagtaccctaggcctagattctgagatcttcccattctaggcctacaagcactacttgctgtagctgagacttgtctagagtcctttgttttgcacttttgacccaccccttcctggatcactcctttgcactccactcccctcgttctgtcactttgaacgaagtctgagtgaggctagtgactccttgggtgtcctcaacagtgaattcactgtctgcgtgcagttattacatgcatttgtgcatttctactacaatggcatctttatgtctctgtaacattggccttttcatggctccacactgggtggaaccatattctcttagatcacatttagtagcataactgtagggactattagagatggcatctcatcgatgagagagaatcacaatcagaatggaagcactttgagtatctgaagagtgagagcattcatgtttgacaggtcctgcttcccactatccttttcctgttattattcaaattttacacaaggactaatcctgggtgtctctgagacccatctcctgcctagacatccacctccagagcaacactggccccacagtaaaagaggaagtcttgtacctcaggcaggcccatctagagctattgctccttcccacagcaaaggtattgtggatgacccttagaatccattctctggtcttctgaaataccaagggcagatgtcacctccttcctcagcaggactgactctgggctctacaaccagctccttcacataaagggtttagagactccccttggctcccagtcaccatatccagtgttgtgtaaagagactggccaacaggaccaaccaagcaccttacctctcccatacaagatgaccctctgagcttttcatttattcaagctctgtggtacagcctttttttaaaataaattaatctatattggttgacaaacaagccaccaaccactgactgcaaaactgcctgatgcagttgggttcctcctggttttcttttgttacaaccacccttgcctgtttacattaattgcaaggagcataacgtacaggctgtatgtacaatcctgggcattgactctgtgacatttctagcatatccaaggcaccaccagtgatttctcctgtttcttggtgggggtgggggggaaggtacgtattctgcaatatggctaaaccctttcctgattgagagttaaagcaataggagtcaagttactggtgccacagatctggaggtatgataggtcaggggctaggtgttgaacttagttaatggaagactgagagcagaacaggtttgtcatctccgcaaggccagaaagtgatcacaaaaagaggcagatgatagacactggggtagggtcataccacagggaaatacctttcctgggcttgttttctagcatatcactgacctgggatctttgggtgatcaagggtgtggttagtggaggctctgtgctgcacgtatgcagtatcctatctctttctacatcagatcaaaacactaagttggtgtactgcctcgaccttttttcagctcatcctggaacatatacagagttgagagttttagacaatctctaggtagaggagacaagatgtagacccagacagaagaaatctgcttccctaccatggctattccagcaccccaacctgtaattgccaagtcctctaaggtactaatttgtagctgctctgaagtaaggatttcggattcagctggtagggaaagactctgcacctgctgtcttagggaagaaatggttcaaatccatgtggtgacattgcattagtctccctttcactgttttcttattctgtaattgtttgttatatttcccaaaaacgtcttgatcactaagcaaagctgctagtgggattctatatttcgtgtcatcttttttattataatttattgcaaatttttttctgaataaatatatgttgtgtg

SEQ ID NO: 17046 - DNA, 1064 bp, Homo sapiens
aggctccagactctcctgttaaccctccatctagatggggggctcccttgcttagctcccctcaccctgcactgaacataccccaagagcccctgctggcccattgcctagaaacctttgcattcatcctccttctccaagacctatggagaaggtcccaggccccaggaacacagggcttcttggccccagatggcacctccctgcaccccggggttgtataccacaccctgggcccctaatcccaggccccgagataggaaagccagctagtctcttctcttctgtgatctcagtaggcctaacctataacctagcacagactgctacagctgctcccctcccgccaaacaaaaccccaagagagcaatgcccctaccacccaagggtgccatggtcccgggagagcccaaacctatcaccacctgttgggcatagccagagctgttcccacccagccagggcatgaaacatcaaccccccacatgtgaacccatcattcctaaaccctgggtaggctccatgccaagtaacagcagagggagttaagccataggaatttggctgtggagtaagagggaatgcggtgaggcactctggaatatgaccctaccagaggttggagaacaaacttgggcagccggaacccgtcactattctagacttccctggcattcgaggagccctttgaactttccaaagtgcagccacagctacaatgctgttaaatcctcccacattcttggatgccccttcaccttgtgtggacagtgtctggtttctccattttacagacaggaaaactgagcttcagacagggggtgggctttgcctaaggacacacaaatttggttgggagttgatggggccagatgagccagcattccagctctttcacccttcagcaacatgcagagtccctgagcccacctcccagccctctcctcattctctgaacccactgtggtgagaagaatttgctccggccaaattggccgttagccacctgggtccacatcctgctaagacgtttaaaacagcctaacaaagacacttgcctctgg

SEQ ID NO: 17047 - DNA, 1366 bp, Homo sapiens
ggtggcggtggcaataggccaaggctgggacccagctgcaaaggctgtaggagtgggcccagcctcccgtggtggcccaggtcctgaggactggcactgagcctggccctgcttccccagggacacttagggccacagaggccaggccagggccctacaggttccaggctcagctggagtggttggggagtcgcccaagggcacatcccacctgcctgagccccgccctccaccagcgactgacagcgcagcccctcctggcaccaactgctcccctgccatggccacggccacagcaagtggggcactgggaaaccctgcccatgtccctcaccaacaaggcctccaaatcctcctcacccccacaccacctacccctgtcgcactgctcctgaaaagggggccaagtcaatgtttcaggtcagtctaaaaaccctagggaagctggccatttaaaagaacccaaactgaccatgggtaaatccagttcccctaaataaggcctgaagaaatccacaggtaccattcccactttccttctccctagctttcttagaggtttggccactaaatcttatgagacttgaaccaagtggcttcctctttctaggcttaggacgggttggggttagaaagggtgatcactgaaggccttgcctgctctgacattctgtgacattaaatgtctattctcctgttacctgtggcctgggacaccagtggggtttatcgaggggaccagaggggcctcaggctttcagatgaaatggctcctcctactcacccactttattcctctccatgtaattcaggacaagctgcaacttcccccagcttaacacaatgcccatacctcatacgatatgcgccctcccgttccatccctggccccctcaaacgagacttctcacaaggctgattacagatggtcaaacctggcttccaaggacagaattgcctctcggaagccagctgtggatctgagtccagagttggccacttgtgtgggtcctcacaagcaaagagagcactaaacttgacattgggggtccaccactccaactttgctttctgaaggttttggtgtacattgagccccagaaggaaaggagagtatctgtgagtgggggcctcccttgaccccagtacgaagtctatgccctgaatccccagagtagcccttcctggtgcccaactggcctggggacaaacagcgtccactacatctaggactgccggctaagtggacacacttcttgacctcctaccaggaactttggtaaaagctagctttggggaaggggttgggtgtaaatatgagagggtggagggagaccagctggtagcaataaacatgggtagaact

SEQ ID NO: 17048 - DNA, 143 bp, Homo sapiens
gttgctggaggagtgacagccaggagccctgacttcacttcctttggtccagttttactctgatacagggtggattccaaaactggctcagtacattgcatgtagttaagccacattttaaaaataaaggcattttttaatct

SEQ ID NO: 17049 - DNA, 1490 bp, Homo sapiens
ccgggaaaacagcccctcctcttctttctccttccgagttcgcccttcccccacctccttgtctttccccgaccgagcaccagactgcagaatgaggcaataatacggaccaacaagaagccgccttatcaatgccagcattagcgactggactgtttttgtttttttggttacaattagttctcatctccctgtcgtcgtcattgttatcgtggttgctgatgggggtggaaagttgaactccatgtctgaggacaagaggtcccgggggtggtgggaggtggcgccggggtcccttggactggcctccttgttcatgaccaagaccaaacctgggccctggatggccttggcctgtcccgaggagaaatgagaaaatcccagatctctgagcgccccccaactccattcccctgtgttcttctgtcttctgtagtatttattttattagtatttaatttgtattgtttcattggtttctgataagtctgtatcactgtgacgatttgagacaacttgttgtattgagggactttctgtacctccttttctttttctttgttgatgagctctgacaaagctattccctggtgtttttttcccccactggggagggggtgaggtggaatggggtgggggaacatggacttgtgactaacgaagctggttgctgctggcccagggctgggggcttgggggtaaatcctgaggctttggtgctcccccacccacccattcccgccctttgcagcagccccgctatcttgagattagtgttgacagggaggggaggattgtgaggtgaggggttaataagttactctaataaaggagcgtggagaagggatctgaggggtgagggtggcccccctcctcacgccttcttcactgcccccctcagagtgcacaatacgagtttgttcctgcctccactctcccaccccgttctggcctccctgtctcaagatactgagcctctcacctcccagccctcagccacccccatccctgccccttctgagactcacagcacccctttccttcctctcctcccacctcctccctcagcccctcattctccttgggaatctgcagagggctctgggactcactgccggatgtgaaatccaggcgtcagctgtttcctaggcaagggcaggaaagtggtctccagcccttgctccactcatgcctgggggcctggggctgagtggtatccctacctggcctccccctggcctctgggcctccagcgctgggtttgtcgagtgagagagagagaggagcttgggttgcttccctgtccccgccccctctgtggcattgtccctcccactcttatttttctaccaattgctatttttccgaacaatccttgtagagtatgtaccatccaaaggcaggagggcctcgccgtggccggctctggttggagatggtacagttttattgtacaggtgctaaaacaacaacaacaaaaaagaaaatgg

SEQ ID NO: 17050 - DNA, 129 bp, Homo sapiens
aaccaaacgatataaatacaagataaattatcactggagttttttctttcccttttttctgtgcctgcataatgctgacacctgcttgtttccatacaaattgatatcaaaataaaatttgtatagatt

SEQ ID NO: 17051 - DNA, 411 bp, Homo sapiens
gaactgaattatatgtgagcccagccctgccagcctttctactcctttgcccttttcccgtgttctaatgtattttgacaatgttgtaagtgtttaccaagccgttggtctcctaagggcctcctgatggaagaacagtggggtggttcaaagttatttctatgtttgtgttaccatgttaacttttccccgagagaaagtgttaacattgagactctggccccagattggtatcttctatgaagatggatactgatgggtgacattgaaaacggcctgctttccaaatgtggttaaatgtaattggttagccccagacttgggctagagcagaaggcataggccagggtggttattgctatatgtgttacagacctcggttctcattaaagtatttattggcagaatcac

SEQ ID NO: 17052 - DNA, 494 bp, Homo sapiens
agacttcagctgcacagtagatttggaaataattatgttttttaaatgcagtcaaattcagttgggtggttactatttttgtatctaaaacttctggggctggattcttttaatcccttgactatttagagtcattgggagggctgcagtttcaacagctagatatcctggatattgtttgcaccatccattgtccctgtaccagagtatgtatcctgaactttggttcataaatatggctcttgaacccatagaccccagttgaagatggaattttcaggaaagggaaaatactagataattctagaattctagtcttcgtgttagatgtttatagcccagcatcttgggacctttccagttactaggtttggacagcttgatgtgaacgaatgggataggatttttaaaatcagccagctccatgcccaaaccttcctgtttgcagaactttttaatgtcttttctttttcattaaaacttttttgttcgat

SEQ ID NO: 17053 - DNA, 1094 bp, Homo sapiens
atgtttttccttctataaggtgccagacaggggaaaagggtgggggtacatctgggatgtcacaggaaacattaaggagagagttgaaggtaaagatctgaaggtaagaaggagttccacctgatgctcgggtcaggatgagaattccaaacacactgccagccccttcactggggatgcttggtctcttctgctggtaaaagcagagatgtttctgtgtcatgcccaagctccccggtgctaccttgcctttctcttttacccctgatcttggctttctctctctctctgcagactttcctttaattgatgtgacatttgtggtaaacacctttcccagggaacctcacaaatcttgagatgctttcccttccccagatgggattgcatgatttccctgactttcctaccctcctccagagagctcagttggaaaggccctcaagaggcatgctagaacgttaggtcagcctactgacagctgacaaacaattaatgcgaaatcatgtcacaccaacccatagccgtgtccacgcagcaactccaccaccttaggatttccccctccaaattattcagaccaatggcttgccaaatggcctctcccaaaattctgtacagttttgctcaggtcacgccaacagggaaacctcaagtgtaggtctaattagtgtttctgggatccaaagttagaggaaaatttagattttattgcctggatctgctttaaagacaattggtgtttacaccctcttgtcagcaaaacagctagttaggtaaggacatatagttccaagtaggtaaagtcacttgattacaaatgttcttaactatcgtctctgtaattcctttatacaggacagtacaaaattgtgggacatgctctggtaacacacagatatgggttgcatatgatccagaattacagctgatattatggatgacaactgctaaggtccataaaatgaagactgtattgtattgagggatagaaattgatcatttaatgggtaacaactgctgagctcaaagatttgtgattgttaaaacttctctggcatttaatcattaataaacatctgtattgtgacagc

SEQ ID NO: 17054 - DNA, 1784 bp, Homo sapiens
gaaacttattattggcttctgtttcatatggacccagagagccccaccaaacctacgtcaagattaacaatgcttaacccatgagctccatgtgccttttggatctttgcaacactgaagatttggaagaagctattaaactattttgtgatggcgtttatcattttatattttgaaaggattattttgtaaggaataacttttaatactatagtttcacctgtattctagtaaatgttgagacaccgttttgcttttaagtatccctatttcttaagttacgaggatgaatacctttcacattttgatctttagttgactctacagtcatgaaacatacaggtctttcaaagtcattctcaatattcagcttttgtaaattatcaagcttcaaaaagcttttttttttaaaaaaaaacatgcatattctaaaaatgactattggtggggaggtgtaaataagtcataccttcttaaaacagaaaatttaagtaaagtcttttaaatgaaacctgtaaaagtattgactcttctaccaagttggtatgatattccaggcagctcaatgattatcacatttgagaccctgtgtttgaagcatttacaggcaatgtacagcaacagaggtacctcttggtgtatagtatttacattctcttttaggtagaagaggcaattttacccttatttcacatggttagaaatttaaagcaagatcatttacccaaggataggtgtttggtaatgttgaaggagttagtctggcttcatgttttacatcttcaactaaaatcccatactatctgcttggatttggagagccaaaaaataaagctgattgtcatgtgattaaatatctgatcaacaggtatgaatataacttaaatcagcatatttttgccatggtaataaattgtcctataaactatttatatatttttgttcttcataattatcactaataagcatcagtttgttgtttttaaaaggatatttaagtgagcattttctagttcatatgaaaataaccatagtacaggatgatttctgtccacacaaaggttaaattagattgcacagttaattttcacttatatttatggtactattatgtgggtgatgcctttttcttttaagcccagtacatatattatgcctgcctaagttctgaactggggctgtatttcagtagttgtagaattattgatatttagttttgatagctaatgtttaattgtttggatctgcacagtttggtttttgcacaaaagtcatttaaaaaaatctgagtaattgtcaaatattaaaagaaagatattcttcctgtaaggaatacagtttttagtcaaagtggccattacatcctctttttaatttacataatacagatacttgagaaagttgttgtggtgttgtatgccaagaaaattctttttattggtgcctatattgtaacaattatttttaatgcattgtattttgaagtaacggttcagttaaatttttcacctgctgtgtaactgaaacacaattacagtttataatcatctgtagaagtctggagataattttgcaactcatgttatgggttaaatgaatatttttgtaaaagtaaaagcaacaaatttataaattgattatttgaaactttacaacacaattgcatcccaaatacaaattgtattgcttattcattatagctattcgtcctgtaatctgtttctaggtgaagcatactccagtgttttaggggttttgaaaataaatatttaaatttcacagtc

SEQ ID NO: 17055 - DNA, 3461 bp, Homo sapiens
gtatgaaagttaattatatgggatctgttgtcaggatacaatacacactgatatatacatgttgaagtaatggtatgcagtaagattttttttaatcctattatgtttagttaagagcatgttactaaaatgctgaggattttgtaggcttgcatagtagttgttttttaactagctgattttgtaaccataaaaacaagctatctgctttatcaataagtgtagttgtaatgtcaaatcaataagatattcacactcctcaataacattatattgattgtgttcccctcaagcatcatattttacatttttttatcatcttttaaacaggttcatgggacagagttagaaaactgggaatgaataagacatccataactactattcttttttcactgttttctaaaatcaaaaagggtttgtaactttttactgcccaactcttagatccttcattgaactgcctaaaaatgtcttgtttgttttatgagccctcactagaaggctgagtttgacatgttgatattacgtagctatagtttgcagtttctgggaagcaattgaaacactattaaccctgtgtatagtgtcaacagttaaagcagacgaaacgaagtaagctatatttctggactgaacaaagctctgctgtttagagcatttaagtttgtttagtggatccatactcaaaggaaagcataagcaaattttcctttacaatgcaaacatgccactggtggcagcacatggtaatttgtggatttttttttcatactcaagtaatggaggctagaaatgaagagaaccttctttttctcttgactttgacagcacatgctaaaaatctcttccaagaagtatgctaaagcttttcatttggttcctgttaaagttgttctcactgaccagcatggactcaggcaactggtaatgataagctatgagctccagtgcttttgccaaaattctcttgacagcacacctcctctctttccatgttatacaaaggacttctggcaaaatgattgagtccttcaagtttaaactaacatttggcaacagcaaattaaacgtttttaagatgtaaagaaagggttaccgcttgctaaggacttcagacaccatgtccgaaacctgttcctctcaagtgccctgttgtgtggaacacttcacatattggcgcacagtacgtaaggaggtctcatgtgctgtaggagtaaaaaagtctttgcataaaacagtatttatttttacttttgtgaccactattttagaaactttatttaatattttaatgttttcagtcattgctttggttatctataaaataggcttttgtgccctacttttcttcttgtagggcttggtggtgttttatcgattgtcagaattgtttttgaaagcctaagaacccagctttttagaaaggattttcacactggcatttctaggtagtgatattttcttccacttacctgctgaagcacatttatgcatttctttatggcaaaaccaaataactttagttgtggtctgcctgatactaccatagcacctcagtaccaaggggagggattttgactagttgaattattaagccaccacaataaagcagatttttaaataagaaataataatgttaacttgactgtacattgagatattctgcagctgatagagcagcattttaaaaatgtaacaggtggaaaattacactgtgcttaatgactgatttttttttaaactgcgagtcccttaagatcacgtttgtcaagtgtgtattcacacatttacttaaatcaagggactcaatgcttgcttttattttaaccatcttttactatttttagaaggaaactagctttagtagtgggttgccctgtatgttttctctttttgctcttaatatgccattgggtttttgtgtgtatgtgattttcaaaattcatgacttgaagtgcaaggacagatctagatgtttgtttaccaagctatgtgacttctcccaaaggatctgtactttctttccttacaacagcttgaaaatcattattttaaaatccttaaatcactgtgtctagatcattttttacattgtgtgccatagacttacccatgggacaacagagctccttcatttttggacaactactgtaatcattttttttttaggaaaaatggaaggtgccgggggtaatcatggccagtcaataattatataaaggagttcaaatactatagctgtcagttgatgaatttgttatgtagtaaaatgtatgactttgtatgggtttcttcagccctttttctgccactagcaaccagaatagcactttaccttttggttggctagataagtggctgactacctgtttttctcactgtggtgtgattggctaaacaatctcgcattaaaaattcaaatgtaaattgaattcacatgaaaaatcatgtttggttgtaaacctccaatgttttgattctctaatcatgttttcgtcacatgctgagtaaaagtgccttacaatgtaaaaattgtacagtacttatgttcccaagtagcatcatcatcttctgggtagtaattacattgtggtattaatatttagaaaaatggacctcagcagtgtatttactgtacatctcttaagtccttaactgtagttttaataagcatgacattatttgataagtatataacatttacatcatttcaaaaaatactgccgttactgtcttttatgcatattttagcctgaaattttgaagcgtcttttttctttcttttttctttttttgttttgttttttgttattgatattaaacagtgtaatctttgcaagcgtatattgaagattattctggagcatttattgccttaccagaaatgttagtaggaaatgttctttagagtagaaagatagacttgagtttctatacttttaagaagagctctttgttcctgggggaggggggcagggggtgaattttactttcatctcaagttattaaaaacccacaactgaagtaaattttatttcaagaatcagcagttttagaatttcagatagtacttgctcagaagtacatgctactcaagatattaagagataacaagatctgtagatctgctattgaatcagaatctgtgtacttgaacaaatgtgtgaatctcaaatatctcaaagcaaaagaaaaagtgttctagagtgttgttgcttttttaaaaaaagcgctgaagttagaccaaggtatacagttttgttctaacagacatttaggttaattgtaaagataaggaatgcattatgggtcaaaaatcaaacattcctctcatgttatgtatattttgttcctgttatattggctttattttcaaaattgtagtttgtagtattagtttccttttattggtattcttgcatatactattcattcaataaatgacttatgactttcat

SEQ ID NO: 17056 - DNA, 65 bp, Homo sapiens
ttcgtatgttaaagcaaagtatatatttgacttatttgtaatataataaaggatgctgatgttac

SEQ ID NO: 17057 - DNA, 589 bp, Homo sapiens
gatgagagttcaagttgagtttggaaacatctggagtcctattgacatcgccagtaaaattatcaatgttctagttctgtggccatctgcttagtagagctttttgcatgtatcttctaagaattttatctgttttgtactttagaaatgtcagttgctgcattcctaaactgtttatttgcactatgagcctatagactatcagttccctttgggcggattgttgtttaacttgtaaatgaaaaaattctcttaaaccacagcactattgagtgaaacattgaactcatatctgtaagaaataaagagaagatatattagttttttaattggtattttaatttttatatatgcaggaaagaatagaagtgattgaatattgttaattataccaccgtgtgttagaaaagtaagaagcagtcaattttcacatcaaagacagcatctaagaagttttgttctgtcctggaattattttagtagtgtttcagtaatgttgactgtattttccaacttgttcaaattattaccagtgaatctttgtcagcagttcccttttaaatgcaaatcaataaattcccaaaaattt

SEQ ID NO: 17058 - DNA, 475 bp, Homo sapiens
tggaaacgacagcaatgctggatcttctggtaattcgtcagctgaaatcggcactgtcacaaactctcctgtgtcaccttctgatactggttctcatttgttctagtagacaaactttcaactaaatgattcacccatcccaagactttctcaccagtggagaaacacacacatcaagcaaaccaagtcagagcaatgagaattgtactgtataatttaaactatctcctatttatcttttttcctcaatttcctaaaattctatttatctacagaacttgcgtgtataattcttgtgtacatccttaaatttaatgtaataacatgttaaagatgttttccaaatcagaaccatgttgaagatacaagcgtaaattgttaggctgctattttctagaaaatgctgtaccttgactttttaaaataatcttatgaaacataattctgataaaatataattgttcaattaacaaag

SEQ ID NO: 17059 - DNA, 2337 bp, Homo sapiens
gaattgctaagggaaacaggtcttacacaaattgacactaactcaaaaaaaatcttaacctgcagcaggctgtttgtcttggaagcttttgtttgagcttataagaacatagacagcttttttttttactagttttaaaacccatcttccaaggtatatgaattctagagtatttatctactcctgtgattttcttagatttgatttcttctgtctgcacaactcttctttttttaattacaatgaaaaattttgtgttccaaggcaactgtatcataggtgtaaacataaagcatataaattatgacaatccttttagaggtagggtcaatatagtggataaacctgtctatcagacgtattgattatagcagtactatagttattctgctgtcattattaaagatgattatattcattcaaagctttagatgtgtcccatgtggcaagaaaggagacagtgaattttgtcaaacaataaaaatgtgtcaggaacacaaggatgaaggggatgtcatttgcctggtaagaactgggttatttccactgaaatttgttatgtttaaggaaattaagattttaagcttgaaattatacaagcagaatctaatttaattttgattgactgaagaaccagggtcttttgctctcctttggtatttcactctcctttggtattcaatcatgtgtcttttagtgctttttaaaattttacccattctttaattcagcatctccctatgtatgtgtcatagaatacttagttctgctagatattctgcaaatatatttgggaattacttcctgctgtttcgccttcttaggttcatagtacacatcagcatatgagaatctctgagaggtcctctagaaaggagagaaaaagcacctcttttggctcaatgttttccaaacttatttgaccccaaaacctttttcatatacccaataataagctacagaactaatattctgcaaatgtctcttggaacacactgccttaaacagatatttctatagctgtcagtatagttatgttgctcccaagcctagttatctccagttgttttaagggtgttatgaaaaattcttaaaatatatatgaatttgtgtaacacacacagagacacacacacatactactttaagggggtgaggatcattaattcagataatttttaagtttcctagtgattctcaatctctttgaattttacttacatttacacacacacgcacacacatatgtatatacacatatcattttaagaagctgaggatcactaattcagataatgtataagtttcccagtgattctcaacctctttgaattttacttataattacatacacacacacactgctacttatataaatgttctcatgtaatcatggtaacagctcaaattcccaaagcaagggaagacttctcattgtcagttaaacctgttaaaacatgaaaatattcattgagcctagttccttgttataaaatacaagaaataagacattcaggcattttccctttatgaagatgttcagtcatcctttccttgaactacaattaggaaaagtatatgtctttattccattgaagttctcgagagtgatataaatactttggggggtatctactatgtgcctaactagtcctgttctaggcttagtggaagctagtaaagaaatataattcatggatcaggctcataaagattttataatatttttagttaaacaagagttgggaaacaggtggagaataatgcaagagagtttgtaattaagtgccaattataccaattgctagacccaggatgtatctttaattcttgtcatccaggtcaacatatgatgctgctataagtctggggctcaaattgatatcccagtagcaataaacatataatataggaggagtctgaatgtagagatgaaaaatacagaatgtaatggcttctcttttctctcttgtggaattgcattcaaaccagaacagtgccttagaatggatgtgcccaactgctctgtatttatgcaatatttgaataaagcggaaatgtatgtgctcttcctgcttcacttgcactaattaattatttgaacaacttagagcttcttccctgaacagtggcaacaagcatggcaattgactctgtcctcatcccaagttggaatcgcttttctctctgcaaccatggcactgtgattatgcatcatttttagcatttaatacagtccatttttggctagtagggttagttgcaatcataatatgagttgcatcctccctctcatttatatcaaatatacttgactagatttttacaagttagaga

SEQ ID NO: 17060 - DNA, 873 bp, Homo sapiens
tgcaaagaccagtgagaaaaaaatgacaagttttctgtgctgtaggatggaacaggatattgttgaagcctcctggaatgtttgagtcaagggaattgctttccagatgctaagaagcagcagtggggcttttgaattttatgattatctggcagtgaaagctgggcttttgccttaataattttttaaagtatgaattgttttgttttgttttcctcaattgaggaagctgatgttattaattcacaggctaaattcggtaaacaccactgcccctaccacgggtaatgagaggtcactcacttgaactttgccattccaggcattctcagagtggcgaggggccacctgcaagtggagcacaacttggtgctcttactgtgtccttcagaaagaataggtgtacagaaaggaaatggcaatcttatgtgtgctgaacaaagttttcaacaattcctagttgtgccttttaaaccatgcaatattcaggatagtttgaatcaaagaagtaagaagctgctatttgggtaacttatttctctgtgggaaggggcagggagagtcaccaaacaatctacctccaactctcttctcttttgtctagagacattacaaagtgcacttgaggctgcccccaacctctgacatttgttcttgcatgtgatgatagaaagtcttcagatggacttatacattctgtgctttggaagcacaagaagaacaaaatatgtgtatatttcctttaatgtttatacaaaagtttatatggagcagtattgttatgtttgtatgaatttgcaaaaattaaagtgtacaaagagattttgattttgcatatataaaataaatcattttattgattttcacaagttc

SEQ ID NO: 17061 - DNA, 192 bp, Homo sapiens
gaatacttgtccctggaggattatcacaccccaaatgcataatctcgttaatgattgaggagagaaaaggatcagattgctgttttctacaatggagcaggatattgctgaagtctcctggcatatgttaccgaatcaactggccttccagaggctaagaaatttctgttagtaaaagatgttctttttccc

SEQ ID NO: 17062 - DNA, 193 bp, Homo sapiens
gaatacttgtccctggaggattatcacaccccaaatgcataatctcattaatgattgaggagagaaaaggatcagattgctgttttctacaatggagcaggatattgctgaagtctcctggcatatgttaccgaatcaactggccttccagaggctaagaaatttctgttagtaaaagatgttctttttccca

SEQ ID NO: 17063 - DNA, 192 bp, Homo sapiens
gaatacttgtccctggaggattatcacaccccaaatgcataatctcgttaatgattgaggagagaaaaggatcagattgctgttttctacaatggagcaggatattgctgaagtctcctggcatatgttaccgaatcaaatagccttccagaggctaagaaatttctgttagtaaaagatgttctttttccc

SEQ ID NO: 17064 - DNA, 164 bp, Homo sapiens
ttgtgttagtgcaaagaccaaggagaaacaaggacatatgctgtaggatggaacaggttattgctgaagctccctataatcctgaaatgaagagaattcccttccagaagctacgaaaaagggagctgtttaaatttaataaatctctgttagtaaaagctgca

SEQ ID NO: 17065 - DNA, 2543 bp, Homo sapiens
gcttactaatactcacttagtgatttgtaaaatttgcacatgtgattgtgaagaaatttgtactacctaaaagtcccagtgcatgtctctgaatgtgtaagctatataaatgctatttatatggcatagaaagaatataaatatcctgtacacggcagattgtgaacaaactatattcctttaagttttcctggttgcactctgtagactggatctgttttaggaagttactttcacagtgatgttgtgtgttctgttagttttatgtctcagttaaagtgtaaaaagtgacggattttctctttcttaaacttacctgacacttaaccagagtaccagttctcgtgatgtgaattaatttttttgtgtgctaggggagggagagtgaggagggagtgttatttccttgggaacctagggaggagaggttcctttgttgggaaacttttgttgatagctgctgcctttgtcctgatcgttttctttcccttttctctggtggcctgttgtggtgcaacgagctgatggcatttgatcttgccccattcaggttggggagtgaagtgtgaggacccttttcccccgcttgctgtgaaagcacagattcattgactacagtacactgttgttcagaaaagaaggctgcaaatgacttctgagactttatgtcttttcttccagaccaagaccgtagaaggagtcacatctagccggcttagccaaagtacaggtgtatatagttcagggcacttgatttagatttggaggggctggggtgggcagagagcaagaggcgagtaaagagaatggtggtttcagagatctctcttcccaaatgtgtaaatattctataccagataagtttaaataagaaatttaattgctgcttaatttttgattatgtactttatctgtatagcaggctttgtcgtcagaagtttttatatcgatttaaattgctgctctttagcagccaaacaggagcaaaatgtaaaatttttgaacttactgtgtctaatcatcatttgttagtctgtagttaatgtcaacagttaatttatgaacccacgatcgttccacactgcaccaaagtcagtcataagagaaatcgaatattctggagcactgattgcagcagggtggctcctttgtgtgcagcaggtgtagtagtcttcattttcatggtacgttttaatattaattacctaagctgccatgcatttttttttttacagttctcaaggaagagcacagaacaatttctcatttcatatttggagtatgaaagtagattctattttgtaatgctgataatacctaaagatgcattgaatgcttggaagaatgctttttgatgttgattttgacctgttcatgattcagaagaaaaacaaacttttttggattttttttccctcaggtctgagtagcattgccttaaatcttatccagttagaacattgatttatttacatgatgttcagattttccagtgaaaaatacccttctgaacaaaacatgtacttactctccgaaaggcatctatctgtgctattgcaaacactccttgagattttaggggaattctaatgttgtaccctttcgtggcagctttgactgttggcatagccatttgttatgtagtggtagcgactttcctgctatgcaggaatccctcccatgacgtgtatgttttacatgatgtgtgcctcttcacgcagtaaatagtttcttgttaatgtatgtttgaggagtttgaacgtcagtgtcacttacccacaaagttattcaagttgtaaaaggttatacaataatttaacaactaccttttttattctgtcgggttactgacctcactttatgtaaatacttcgcatgacaaattcagtaactcgtctatttcagcatgcataagacttttcactagggaaactgataaagcttgagtcaactaaatctgccttcatactttatcaaggggaaccaagcctgctgtgcttacatcagcatctggaagactttcctctcctctaatctgtgtacacatctccaagcaaggaagaaaaaacaaactctgctcagacgcctatgaaacacctgaatgaactttgatgaagtacagtctgagttaccatcatgcacaagtagaactgctcttggacttgttttcctgttgtttgtggaacctacgcgtttgaatggcttgaacgttgcatcttttaaagttattttttaaggtttcttggcatttatcctagttgtccgtgtttggcaatgtgctgttaaagtaatagacttttaatctttatgtattttttgttttctctggagtacttggacagatgttatagtggtttcttttaggaaaatctgtcattaaaaaagttatagccttgcaaataaccactcacagtatttgagtcacagtttattttagtgagacgtaaagagtgctgacttcatttatttttctacctatatacctagtggaaaaggggaagactaatgttttcaaataaacaaacagaaacctaacagaactt

SEQ ID NO: 17066 - DNA, 1324 bp, Homo sapiens
actgacaggggctcctgtcctgtaaaatggcatttgaatctcgttctttgtgtccttactttctgccctataccatcaataggggaagagtggtccttcccttctttaaagttctccttccgtcttttctcccattttacagtattactcaaataagggcacacagtgatcatattagcatttagcaaaaagcaaccctgcagcaaagtgaatttctgtccggctgcaatttaaaaatgaaaacttaggtagattgactcttctgcatgtttctcatagagcagaaaagtgctaatcatttagccacttagtgatgtaagcaagaagcataggagataaaacccccactgagatgcctctcatgcctcagctgggacccaccgtgtagacacacgacatgcaagagttgcagcggctgctccaactcactgctcaccctcttctgtgagcaggaaaagaaccctactgacatgcatggtttaacttcctcatcagaactctgcccttccttctgttcttttgtgctttcaaataactaacacgaacttccagaaaattaacatttgaacttagctgtaattctaaactgacctttccccgtactaacgtttggtttccccgtgtggcatgttttctgagcgttcctactttaaagcatggaacatgcaggtgatttgggaagtgtagaaagacctgagaaaacgagcctgtttcagaggaacatcgtcacaacgaatacttctggaagcttaacaaaactaaccctgctgtcctttttattgtttttaattaatatttttgttttaattgatagcaaaatagtttatgggtttggaaacttgcatgaaaatattttagccccctcagatgttcctgcagtgctgaaattcatcctacggaagtaaccgcaaaactctagagggggagttgagcaggcgccagggctgtcatcaacatggatatgacatttcacaacagtgactagttgaatcccttgtaacgtagtagttgtctgctctttgtccatgtgttaatgaggactgcaaagtcccttctgttgtgattcctaggacttttcctcaagaggaaatctggatttccacctaccgcttacctgaaatgcaggatcacctacttactgtattctacattattatatgacatagtataatgagacaatatcaaaagtaaacatgtaatgacaatacatactaacattcttgtaggagtggttagagaagctgatgcctcatttctacattctgtcattagctattatcatctaacgtttcagtgtatccttacagaaataaagcagcatatg

SEQ ID NO: 17067 - DNA, 397 bp, Homo sapiens
tttgtgaagttgtgcctaattatgtaaaaagaatataatacctgtggaaataaaaatgaattccaagtgtatacttgctcgggtgatgggtgcaccaaaatctcacaaatcaccactaaataatgtactcatgtaaccaaatgctacctgttccaccaaaacctatggaaatttaaaaaaaacaaaaataaaaagcaaaacaaaaatcccaaaatgaattccattcacaaacagaatttttcaataaatcccagtagagatacttgcctcctcccaacccctgattggggaaaaggttgaatttgtgaaacaatctgctccaaccttctattttaattattattttgtaaggggaagaataacatttgataaatattaaagtcagaataattctcct

SEQ ID NO: 17068 - DNA, 64 bp, Homo sapiens
cttttcaaggaaaaatgctgcttctcctcccagcgtgtgtatccgactctaagctgtgtgcagg

SEQ ID NO: 17069 - DNA, 317 bp, Homo sapiens
tcccttaaacttgctttttagggagagtcctccatctacatttgcctgtgcttcagggtaattactagtagtgttacatgaacatgtgcatagtggtaggatgccatcagattaaagcattgaagtgtttcattgttacctgtacctaatggttttaaatatatgttaattgattgtttagttaaaatgtcatagttacaatgcaagtaaactggatacttgttcttttgtcagatttgttaaatgcatgcagaataatatttttaagagtattgattgaagtttgtgatattcatcaataaaaatgagttgataat

SEQ ID NO: 17070 - DNA, 265 bp, Homo sapiens
tcaagttggaggagaaagacaacacttggtctaagacacggcagcaagacatccctgcatattgttccagataaaaatgaaagctgctcacacccacttgcctccccaatctgttaaacagcttcgtgtctagtatgagctcagtacttgccctgtgaaaatcccagaagcccccgctgtcaatgttccccatccacaccctgcttgctcctgtgtaacagctcagatgatgaataataataaaactgtacttttttggatggtg

SEQ ID NO: 17071 - DNA, 974 bp, Homo sapiens
acagtgtcaccttgcaggctgtggtggagctgacgctgggagtcttcataatacagcacagcggttaagcccaccccctgttaactgcctatttataaccctaggatcctccttatggagaactatttattatacactccaaggcatgtagaactgtaataagtgaattacaggtcacatgaaaccaaaacgggccctgctccataagagcttatatatctgaagcagcaaccccactgatgcagacatccagagagtcctatgaaaagacaaggccattatgcacaggttgaattctgagtaaacagcagataacttgccaagttcagttttgtttctttgcgtgcagtgtctttccatggataatgcatttgatttatcagtgaagatgcagaagggaaatggggagcctcagctcacattcagttatggttgactctgggttcctatggccttgttggagggggccaggctctagaacgtctaacacagtggagaaccgaaaccccccccccccccccgccaccctctcggacagttattcattctctttcaatctctctctctccatctctctctttcagtctctctctctcaacctctttcttccaatctctctttctcaatctctctgtttccctttgtcagtctcttccctcccccagtctctcttctcaatccccctttctaacacacacacacacacacacacacacacacacacacacacacacacacacacagagtcaggccgttgctagtcagttctcttctttccaccctgtccctatctctaccactatagatgagggtgaggagtagggagtgcagccctgagcctgcccactcctcattacgaaatgactgtatttaaaggaaatctattgtatctacctgcagtctccattgtttccagagtgaacttgtaattatcttgttatttattttttgaataataaagacctcttaacatt

SEQ ID NO: 17072 - DNA, 2028 bp, Homo sapiens
ggacaaacacaaaccctgttaattatagaatggaccaaatacatttttaaaagaaaactgagaccaatcagatggaaatggagttttaaggcaagaggccatatatagggctacatcttgttaattgcaattgtccaggaaggttttgggcaagatccaaaagtagccatgcccttttctcaggatagaaaatatgttttggcatttgaagcattttttacaaaatctttacactactttttcttccccttcctcttgctctctgcacaccccattcttaaactcctccaattcattttaacacttgtcctgtttcttgagaggaagttatagaaggcttgttggtggtggtgatgttaaactgatggaaattctttttcgccttagtggtgattgtttaaactctcacagtcttaaaccgtgccaaagtcctgttatgtcttgaacttttcctcaaagcattacacttgtgaatgtatttttgtctaatagggtcgaaactgttgttcagtattttttcaggctgaggatgtgatgttactctacacattgtgacgtttagtatacagttgccttttgtaataactttttttttgtaaatacatatccattgatgccatatttatcgtttgtaatttaattattgctacaagtgccgggaactgaacaatatttatggataaatgttttctaacaaattctgtacagcttttgattataactgctttagcattaaaaattgttttgaaagaagaacacaatttacaattttggaaccactgactcctttctcttgttttgtaacagccttcttctacaaagaggagatgtgagcaaattaaatcttgtttgttggtatttataactcactcagatcccttttttaattgttaaattatttttctattacagtataaattccttacagtgtcagtttccatctgggaagactctcctttctttatctctatctcagatggttgtttaactgcgagtttaaatgtgtttgtcctggattttcggcatgcaaatcaaatattactgatcaattcagttagtggccatgacatctcaatcttgtacttcaaagactgagaagctggatttaatcatccctgccctacatatataaacataaggtaacctactgaattttatgtcccttagttctttattaccttacataaaaatgaaaattgcggcaggatgcatgtctgtctgttctatctagagatcacccatatacctatatatgtttgtatctatgacttatctaatctgcctatcaatctatctagtagctatctatatattttcaaaagatagcttatgtctaaaacagtggtgatgagtaaggccagttgagcattgcttacttatggttaaagtgcttcttaaaagaaccatagtccatttacaattttggaaggcaaaggctgatttgtttgctgtatatagttcaattcataattatcgcaattatccataacatttatatagcggtgtaataactgcagcagttctgaaatgatgctatgggaaaaaaattgcaaaatatgtatttttaaagttcatgatttgtaggcaaagatgttaagagcattgtttccattaaaatcaataacaatgaaaaacggttgtttgctttgtgataaaatgttaacaatccatttaatcttcagtgaagcaactcatttggacaaacagttcttttacagtggttatatggaaaagaaattgattgctattttggggggctggagtgggtagagtattgagaccttttttattagggtgctgtttgttattgagagcccaatctctgcatgaataacagaaaggtggacataaggaattgtaaagtatttagaatgtattgaataggcttaagtacctcctttaaggggcaatgctctaggtttttggtggcagtcaatttggtattatatatgatcattttcaattctagaattttgtttattgttctttttgaagaaataaagtcttggcacatcttatttatgttat

SEQ ID NO: 17073 - DNA, 1387 bp, Homo sapiens
tgaaagatggatttccaaggttaattcattggaattgaaaattaacagggcctctcactaactaatcactttcccatcttttgttagatttgaatatatacattctatgatcattgctttttctctttacaggggagaatttcatattttacctgagcaaattgattagaaaatggaaccactagaggaatataatgtgttaggaaattacagtcatttctaagggcccagcccttgacaaaattgtgaagttaaattctccactctgtccatcagatactatggttctccactatggcaactaactcactcaattttccctccttagcagcattccatcttcccgatcttctttgcttctccaaccaaaacatcaatgtttattagttctgtatacagtacaggatctttggtctactctatcacaaggccagtaccacactcatgaagaaagaacacaggagtagctgagaggctaaaactcatcaaaaacactactccttttcctctaccctattcctcaatcttttaccttttccaaatcccaatccccaaatcagtttttctctttcttactccctctctcccttttaccctccatggtcgttaaaggagagatggggagcatcattctgttatacttctgtacacagttatacatgtctatcaaacccagacttgcttccgtagtggagacttgcttttcagaacatagggatgaagtaaggtgcctgaaaagtttgggggaaaagtttctttcagagagttaagttattttatatatataatatatatataaaatatataatatacaatataaatatatagtgtgtgtgtatgcgtgtgtgtagacacacacgcatacacacatataatggaagcaataagccattctaagagcttgtatggttatggaggtctgactaggcatgatttcacgaaggcaagattggcatatcattgtaactaaaaaagctgacattgacccagacatattgtactctttctaaaaataataataataatgctaacagaaagaagagaaccgttcgtttgcaatctacagctagtagagactttgaggaagaattcaacagtgtgtcttcagcagtgttcagagccaagcaagaagttgaagttgcctagaccagaggacataagtatcatgtctcctttaactagcataccccgaagtggagaagggtgcagcaggctcaaaggcataagtcattccaatcagccaactaagttgtccttttctggtttcgtgttcaccatggaacattttgattatagttaatccttctatcttgaatcttctagagagttgctgaccaactgacgtatgtttccctttgtgaattaataaactggtgttctggttcat

SEQ ID NO: 17074 - DNA, 53 bp, Homo sapiens
caagaagctacatccctcaaacttcggcaatgaaaataaagtttgagaagctg

SEQ ID NO: 17075 - DNA, 53 bp, Homo sapiens; identical to SEQ ID NO: 17074

SEQ ID NO: 17076 - DNA, 63 bp, Homo sapiens
caagaagctacatctctcaaccttgggcaatgaaaataaagtttgagaagctgatggctgtgt

SEQ ID NO: 17077 - DNA, 138 bp, Homo sapiens
tgcctttccatcctggtacatggatgctttgaaagatatggaagacagagcccaggccataattgacaccacagatgatgctactgccatggccagtgcaagccccagtgtcatgtccaccaacttctgtcctgagtg

SEQ ID NO: 17078 - DNA, 563 bp, Homo sapiens
agtctagggcagattcttccctctgagtttgaagggggcagtcgagtttctacgtggtggagggcctggttgaggctggagagaacacagtgctatttgcatttctgttccatatgggtagttatggggtttacctgttttacttttgggtatttttcaaatgcttttcctattaataacaggtttaaatagcttcagaatcctagtttatgcacatgagtcgcacatgtattgctgtttttctggtttaagagtaacagtttgatattttgtaaaaacaaaaacacacccaaacacaccacattgggaaaaccttctgcctcattttgtgatgtgtcacaggttaatgtggtgttactgtaggaattttcttgaaactgtgaaggaactctgcagttaaatagtggaataaagtaaaggattgttaatgtttgcatttcctcaggtcctttagtctgttgttcttgaaaactaaagatacatacctggtttgcttggcttacgtaagaaagtagaagaaagtaaactgtaataaataaaagtgtcagtgactcatttatttg

SEQ ID NO: 17079 - DNA, 34 bp, Homo sapiens
tccaaattggacaaatcatcaccactgatggcga

SEQ ID NO: 17080 - DNA, 691 bp, Homo sapiens
attgatccaatcattaagtgtgcatcacttctcctgttctgccaagacttcttcctttttgcttgcatttaatggacatagtcttagaaacattacagaataaaaaaacccagacatcttcagttatttggtgattaaatgtacattagcaaatctatgtcttgtcctgattcactgtcataaagcatgagcagaggctagacgtatcatccggattgttgtgaaacgtttaaaagcagtggtccctccctgcttttattcatttcccccatcctggtttaagtataaagcactgtgaatgaaggtagttgtcaggttagctgcaagggtgtgggtgtttttctttattttatttttttgaggggggtaagtagttttattttaattttatgggctcctttccccgcctttttggtgatctaattggattggttaaaagcagctaaccagttctttagaaatatgctctctatccaagtctaactttatttagacactgtagatggacaagcttgattgtttgaaccaaaatgggaacatttaacaagcatcactgccctcactaataacattgtgactttgctgtcaagtgtagagtccccccttcaaaataagcttgtgaccattttgtatggcttgtctggaaacttctgtaaatcttatgttttactaaaatattttttgttattgt

SEQ ID NO: 17081 - DNA, 394 bp, Homo sapiens
gagaactccatcaatccagtccaagaggaggaggacgaaggcctagactcagctgaaggatcttcaaagcaggatgaagacctagacttacctgaaggcctagactcagctgaaggatcttcaaagcaggatgaagacctagacttacctgaaggatcttcaaagcagaatgaagacctaggcttacctgaaggatcttcaaagcaggatgaagacctagacttacctgaaggatcttcacaggaggataaagacgtagaattacctgaaggatcttcacaggaggatgaagacctagagaaaaagcgatcatctaggtcaagaaatgaaatcgaaatttcagaaattacagaaattctccaaggaaggagccagataaataaatattctgatt

SEQ ID NO: 17082 - DNA, 877 bp, Homo sapiens
agggaaatcatttacaaccctaaggcatcagaggatgctgctccgaactgttggaaacaaggacattagcttttgtgtttgtttttgttctccctttcccagtgttaatgggggactttgaaaatgtttgggagataggatgaagtcatgattttgcttttgcaagttttcctttaaattatttctctctcgctctcctcccctccttttttttttttttttttttttctttttcccttctcttcttaggaaccatcagtggacatgaatgtttctacaatgcatttcttcatagattttgtttatggttttgtttcttttttcttctttgtttttcagtgtgggagtgggaagaggagattatagtgactgaagaaagaataggcaaacttttcaaatgaaaatggatatttagtgtattttgtagaagatctccaaagatcttttgtgactacaacttcttttgtaaataatgatatatggtatttccatcgtcagttaccgagtatagccactgggtatcactactttgtgttaaagtgccttcgcactttaagtacattacttaaatgttgcttttagctttgataaattgaaaatattttaatgtgttgtatttttgaaattgaaaacactgtaaaatagattgatgtgtcagctatattaagtcaacgtacagtttgcttgagttatagaaaccagcctgtcatcaaatgattctagttctaggactttgtaggcttaactataaaatatttcctttcctctgggtttaagtgattttatttaagtcaactaaggggatttaacagtggactagaggtaataagccacctcagtcaggattaataattcattaataaaatatatttaaccc

SEQ ID NO: 17083 - DNA, 1837 bp, Homo sapiens
caaatggtaattcccttctattttagctcttaattagttgctttcactatttccgaatatacctgtggctaagtttttattgaaacactcaaaaataccacttctcagtatgaacacaattgctaagagcctaatttggttctggactatggtcaacctgtgtgccttgttagttctctccagcagctggtgagtaaggaaatgacccttcaatttcctcttctttttcctctgacctctgtgacttaatttttcttaatgtctccaagtcatcaagggcttaataatttatgaattttacaaaaagcatttaaggaataagaaagaggttctgtgatttttcagactctgaaaattcattttgattctacatattccagaaatatactgggttggatgctagagtgaagaaagccgtccagacaattctcccagtccattcatttcttcattcatttgttcattcagtagttattgagtgcttatttcctgggtgcctggctctaggctatgtcctgagacatacagtggacagggtctctaccctcctcacaacaccctcttcaccctccacgccaccccctactactcactctcaccctagcaaggagcttcgtgctaataagagagagtcttacctgaatggcaatcgcccagattaacagtggagacagtaatgcaatgcaggaagttaagtttttaaaggtgattctgtgcagtaaggtataaaacagatatataataaatagcctagcttagtctaacatctctttagaattacacagctaaaaaggaaaaaaaacaccaaaataagataaaataaaacaaatttaaacaccaaaataagatataataaaacatttgtttttgcaaaataaggcccaatgttatggcctaatgaaagctatatacttgtgctatctaaagcactactttgtaaagatgactacccaagattgtaaatacaaaatttaaaaaggtacttaaattttctggaatatccatgtttcagaggtaatatttactttctatttcagtggcttaaattataacgttttggcttaagtgtcttttatcaatacaatgataagacaccttaatcctgagagagaaaattaagtactgtatataggtgtactttgcttctcacaatgattgtgcaaaaagtcacgtgtaaattgaacttttgtaaatcaaattgtattttaaatgcattaggggagctgccatttagaggaaacttgtgaattctttcataaagcagaaaaccattttataatacaaataaccattctctgatttatctcttttgtatgtttggattttcaatatcgactttgcttaaaacagagcccacctgcatagtaactgtgttttgccaaggctgcttgtgctaccagtttgctggtggctaacggcttgtgcttgaaagtcttctgaagtctgatgtgaattgagctatcaagcaatgctatcatagcacagtagcagtcctgaacagtctgagcagccaacccatttcaacaaaattgaacacaggactcttctgctcagcagcatctcttttctcagatgtggccatgttacagtagagggtattccataagcacatattccataaagtgctcagagtcacaggttttataataaattatgttattatgtaaacgaattgcatgcatgttgaaattttttagcagtactttagcttgaaagtactcgtacaaatactgttagatttagttgcaaataattgttctcaagttattgcaataaatgtcaaatgaaacaagctcttgtgtaaatagacttctgtgcctaatagtgacattgtttc

SEQ ID NO: 17084 - DNA, 2247 bp, Homo sapiens
actgcataattctgaagttatatttcctataccatttccgtaattcttattccatattagaaaactttgttaggccaaagacaaatagtaggcaagatggcacagggcatgaaatgaacacaaattatgctaagaattttttattttttggtattggccataagcaacaattttcagatttgcacaaaaagataccttaaaatttgaaacattgcttttaaaactacttagcacttcagggcagattttagttttattttctaaagtactgagcagtgatattctttgttaatttggaccattttcctgcattgggtgatcattcaccagtacattctcagtttttcttaatatatagcatttatggtaatcatattagacttctgttttcaatctcgtatagaagtcttcatgaaatgctatgtcatttcatgtcctgtgtcagtttatgttttggtccacttttccagtattttagtggaccctgaaatgtgtgtgatgtgacatttgtcattttcattagcaaaaaaagttgtatgatctgtgccttttttatatcttggcaggtaggaatattatatttggatgcagagttcagggaagataagttggaaacactaaatgttaaagatgtagcaaaccctgtcaaacattagtactttatagaagaatgcatgctttccatatttttttccttacataaacatcaggttaggcagtataaagaataggacttgtttttgtttttgttttgttgcactgaagtttgataaatagtgttattgagagagatgtgtaatttttctgtatagacaggagaagaaagaactatcttcatctgagagaggctaaaatgttttcagctaggaacaaatcttcctggtcgaaagttagtaggatatgcctgctctttggcctgatgaccaattttaacttagagctttttttttttaattttgtctgccccaagttttgtgaaatttttcatattttaatttcaagcttattttggagagataggaaggtcatttccatgtatgcataataatcctgcaaagtacaggtactttgtctaagaaacattggaagcaggttaaatgttttgtaaactttgaaatatatggtctaatgtttaagcagaattggaaaagactaagatcggttaacaaataacaacttttttttctttttttcttttgttttttgaagtgttggggtttggttttgttttttgagtcttttttttttaagtgaaatttattgaggaaaaatatgtgaaggaccttcactctaagatgttatatttttcttaaaaagtaactcctagtaggggtaccactgaatctgtacagagccgtaaaaactgaagttctgcctctgatgtattttgtgagtttgtttctttgaattttcattttacagttacttttccttgcatacaaacaagcatataaaatggcaacaaactgcacatgatttcacaaatattaaaaagtcttttaaaaagtattgccaaacattaatgttgatttctagttatttattctgggaatgtatagtatttgaaaacagaaattggtaccttgcacacatcatctgtaagctgtttggttttaaaatactgtagataattaaccaaggtagaatgaccttgtaatgtaactgctcttgggcaatattctctgtacatattagcgacaacagattggattttatgttgacatttgtttggttatagtgcaatatattttgtatgcaagcagtttcaataaagtttgatcttcctctgctaaattgatgttgatgcaatccttacaaatgattgcttttaaaattttaagctaggaaaagaaatctatagaaagtgttctgttacaaaatgtaactgttaccattggaaatttcacgtcataggaagttagcctttatctaccaactttcaagaacttgtttaataaagcgaaaaactcaaccaaatggtacaaaaccacagtgtaccattaaaatatgcactaagtctcttttttacaaaggctgtattcagcaaggcgctaacttgcttaaatgtgaattactaacttctaaaactgtactttgattcacatgttttcaaatggagttggagttcattcatattacaatatttgtgtgctaaacgtgtatgtttttcagttcaaagtcatgatgtttttaaaatcttattaaagtttcaaaaatctgaagattgtttatctagatgtaaatttt

SEQ ID NO: 17085 - DNA, 159 bp, Homo sapiens
cattattttcccctcaagacaacagaaaccattcagagcagaggggactgtctcagccatgcaaacctcatggagcattttggaaagttaaaaattgattcttatttttgtcatgtttactttcaaacatgaaataaaattgagttctgttttcatgca

SEQ ID NO: 17086 - DNA, 9330 bp, Homo sapiens
tgggtgttctcagatctctagcatcacgacccatcactctacctctaccagcgcactgatggtcactggtggaactccactcactggggaacgttctctttggttatgtttgtttttatgcttcttttgttatctgtaaaaaacagaagtcattgtaagttgacactacaacttaagggcagtgtacgttttattacttagtcattttttttcttttagcatttgatatgcatttctcagattccaccatctttttgtgctttatggaatgacagtccctacaatattgttttaagcccacactacccaaaacaaagaatgggaagcacttgtgataaagacaggctcctgagaaatgcaacaagtggtcttacatatacatgagaacttagacacaagggaccatcccccaaactctactcttatacccagaaaagaacatatttcagaatctgtcaaacttttgtgtatcccacagattcaatcttcaggtgagaattttcattgtcaaaacccactggttagatgttgtagcaacatcataaaatcaagagtatcaagaaaataaatgagcatagcaatgctactcttaaaaagatgctatgccacacaaccagaggactttcttgttagcatccctttcctgattccctattttgttaattttaatgataagaagaaagggtgacatttattttgacaagttttaggcatcagctggcatcagtgtttttcaactccattatttgaagtgtaaatcctcacctggggttctctgtgtgcaaagctgtccttttgaagaacagtttggttgatgcatgccttagtagccaaaatgctacactctagacttacaagtgggagttaagagaggtctggaaagtgtccaacaaggaattcacacctctgcctcctttgcaacaacaacatttacacagttggtaagtgggtccataactggcaggatttttaaattgtattttgctcaaatctatgggaacaaaagtcaaggtatcactacctagaagtaatgatatacagttttcttcctagtggcttgaaaatctggacttcctcaattattattcacattttctctcttataggttttctgttttctactttcttttttctcttatctgtgtttccctttcctttgtttggctcattaacttttgactgaattacaattactccttttattaaagtccatattattgtgaatcatttccatgaaaatttctaagaaaactccaaactctctaaatagtagctaacttttatttttttaaaatgagtcgtggggtagtgcttcaccttgagatgctttgaaagagccctaaacattgggaaccattcacctaatttggagacatttctcactggttgtgactacccccttatgatccttcacattcattttatgtccctaaacatcacaatgtaaatatcatttttgatgttccagctcaccagaagattcttacacttggggtaaacactatccatgcattacttactggtaattacctgctggtatataattccatgtagcctttaatatgctgggttatcaaattctgttcactgagttatgaccagataaataatagatatgcacatgaaagatgcaaacttgtgtgattattaaagccagccatgcaggtccatgatagaaacagcaggtgatgactctgcactctcattgtcaaggttagatatatccccagttgcaaaacagccagacttgagctgtgctctggtcatctttgagtttaaggccttttgttgtataaggctgtggaagttgtactccaatggctgaagccatgttgttaatatggctgatgggagcatccctgcagctgaacccagcactttttatgctcccactgtggttgagctttatgtttacagtctcagcaacaacacttatgcatccaaacactcacaaatgaaacctgaaagaatcttttctgagcctcttaaaagaggaaaatgatgataacattaaagactctgaacacccaaggttggtgtcacatataaaaattaagctgatgactttgcagtgactcaagttgtctctttatcatggtttaccaggtagagtgcctggctattactatataatgaagcccactggcttgacttgtaagttcaacctaaaccacaatcctagaccatcatggatttaggagtagattcttcttgaaatcccacatccagaaactagacattagaatgttgaggcagtttcccagagaaacaagcatattgcctcatggatgaaagacttgtagttctagtttcagtgacttgttatatctacttacatacaacagggaggcaagaggattctctgtcatctctggtgactgagtgtaaaatatgtgccaagtctgcagcacagtgaccaaatctgacaatcgagctctggatcaccacttgattatgtagtagactcatttataaagcagcttaggaactaattaaacatggaggatgaattaccttcctatcccttgagataagacatctttcagtttcatgattaaggattgttgctgttttatagttactctgttcatcacagtgtaaatggtgatgcgtgtcgtaggtgtgcagctatttgagggactaagggatggagatattctgtcaaatgaatctcttcagtataccagtttgtgggagggatatgagacatgtggatggcagtgagagatcgtgcctctagatcttgatggaggcttggtgagacacacttaaataagcacgtggaggttagaatagagggcagagtaaaaggaagctccatctgagcaagtacaccaaatgatctcagccctgcaacttgacccaggtagggccaccactacgccttcacttgtcacccaagctccaaccacagagagtttgacaagtttgtgttatgatgttggcttggctttgtatttttaattaactttggatttttagtggttttgtcatataactgtctgagtttggtaggtaggattactttgaaaagggtttactagtgtggtcctccgggtagaatttagctgtaagcatgttgttagccagcctgtagactgttaattacttaataatctcattgggaaaatactagtagttttatatttggatgacataattggaaaagcagattagctgctactacttttaaaagacttaaggtcgggatgcctttttttccatgtaaggaaatgaaaagaccaaaatcttcaggcaaaaagcaagttgcaaaattagaaaccattggctaaaaatgtgttttgttgagtttccaaatggatgaattttcatttggacattacatcactaaattcattagattttgtctgcattggaaagatactcttctagcatatctttcccaaagatatctaatttggattctgtttcatgcaaatttgcatcccggaggttgaagttggagtttgaggttggaaaatatctttgaaggcagaatcagttgagttgtgagggtgaagcctcacatacttctcaacagacatgataaaattcacctgcatgagttggcaggtgggagaaccaaactggatcactgggtaagactactcagtaaagcaatgaactgcttgcttagagaagcatcactatccccattgagaaaaatgtgtggcaagatgatacagctacacagtatcaaatgaatgggtcaattcagcacccccaaatttaattctgtggggaaaaattattgagccagttgtcagtgttctgttacatgactggcagactaaattcttcatcgttgttgttattgttgttgttgtttctcattttcactcgcacggccttattctcataattaaaatctaattcattttctctttagtgttagtagactccaacaacagaagtggcatctgtgtattcataatcagcatttaccctggcaggagactaatcagataggccggtctcagacattaatcctaccatctgatatttttggtgaaggaaaaagtattaattctctttccatcctcctcctcagaaatatagaagccctctttaccaaaatcatcacattttactctgtaatctaccagctaaaagaaaattgcattgtggggagggcagaaagggggtgggggtgggggtgggggggtggggggtggggaagccccacaaagccagattgcagttcttgcccctttttgcgtctgacatgagatgttaaagaattattcatagtgctcacattgggttaggggacactgaactgctttttagatccatgatcagtcatcattcttctaagagattggagctttgctgtttcattaactgtgcagtgtagactaatggtgtttaataaaaatcattcaaaatttcaaactcttttgccagtgacctcaattttgttggctctgtgatttgtatcagactttgaggagggaagggggaagtgaaggaagcctacgtccaggcccctgacaggatgctgcagtagcaagctcaagctcgcctgcctgccagcagttgctggtgagcagcagcatgcagaccagctgtgggaagcctcctgaagaatgccccagctgatgctttcagctgggaatagtttgttcctattggggaactcattgttctccagtctctgcagcaggaagccagctgtcatattcggagggaatttcagatgctttacctttttggttttgtcctgcatcactcatgtggctacgaaagtgtctctgagaatagagcccaatgtggtgacaatgggtagtcaaatgcaccccagatgctcaagccctgttgtggttctgcagtgtttatgaaattgggaggaaggagaccctggacagtaagcaaaattggagacactccaacgaggctaagttaatgccgtgttgcccagaacaagatctagcttctcatttggtcagcctagcatgcaaccagtggtgtgctggtaaaatgtttaacaaccagctcgctgagaatagaaagcacctggtttgcaccatttgccaatttccatggcataaatactaccactttagatgattttaagctaccaactgtgatgtcactgaacacatggttggaaagagatgcacgcagttggctcttgcaagcctgggcaaaaatgcttcaacacgccactggatgcagccagtcagagggttcatatttaatatatgtgttcatgtggacacacacagacacacacacacaaactcacccttacacacacacttcgatgactaaaacaattacatagttttaagatatgaatcaatgtgtgaatgtagaaagcttatgataaggccctagaggtatgggttgccctggaagcctaggttttaagcaggagaatagctgagaagaatgaagccctcctgagctgaaaggagagatggatcaatggagatggttccatcatctccttccatatctcacaggtaaaatgggcactcagaaaaccctcacgattgattttttaaaaagataagtgagtgttttttattttattattattgtcatcattattttgatttacaaatgctatttgtaacttttacatgtaactaggataaagtatttacgggaactctatggagaatagcacaatccagaatttactgtgtttttcttttatgtgacgtggaaactcagtaattctcccaccttcacattgttgttcataagaattttactttagttattagggaatctaagttttttgttaacatttgtttttagttaaaagtatctacttactgttttagctctgaactcaaaccagaatatctctgtatcaattgcatgactattcagaaacaataatccaaaccaaaataattctttttccacccagtacgaagaaaactaagctcagtaacaagaaggcataaactaaagtatataatgaggctttcattaaatacacacacacacacactcacacacacacacatacactttttaaatttttaaattaggcctccacacataaatcattttgaaagtagaatagaaaatctcaaagaattcattctcctggtcctgtgcatcttctgcagttaataagaggtttgtatctggaaagatggaagaacttgttctaaaatcttatttttcaaaaaaaaatttccattttctctctgggcctgtatccatggttgaatgttagccctggaggagatccatgtcttactcgctctttctggcccttctgtcttttgcctctgcaattctttttgtagctggcacgatagcagggactgggggtctatcctttcatggtattgctacaatatttgtccttactggaaaatggtaacatccgggtctgatttaattggcattacacttacacagggactctgagcacccccgtcaccacaccagacagtggaccagttttcacagctacaaagagctagaaatgtgtttaacatcatccagtgcatcccctaattcaaaaccatcctcactaatcaatcatattcacccataaatattacaaatgagattgattccatctcaagacaatttgtcaaatacttaattttcttcctggatgattctacttactggatattttagaaagagaaatgtctgagataaaatccctcacatttactcaatataacaaattactgtttctactcctattctgagtagtgcttctgaagattgtttgctgtagtgttgtctttgataaaatgaatgtcagtagtgagccttttagagataccatgctcagacatcctctttgggatcagaagatacctaaaattctccccttttgcccacttggttagatgagtgatatattctttggatcctgcaaagaagagattggtttcttttcttttctggtggtggtagtggttgtatctgtggctgtgatggttgttgttacttgtctctctctctctctggctctggcttttgctttcctgctagtgttctttctctttccaaacaaatagttaaattaaacgtgagcttctgaattgtacttgttcatactttcaaaacataacagattaataaaaatagatgtgtcctgatttaaaacatgccccctggaaaggcatgctgtattatgaaatcgtgataatataactgcattattacatggcagtataaatattagtctgttgaattcatttgtccaattgtataactttgtggagcagtgttttgacctttgatacataattctggagcaagtggagtggttgcaggcagatgagacagtgttatatcaggatttttcaatcaactttagttggaggcctggcaattacaaacatcttcagatgtttctgtaaccattataaatatgaaaaaaacctcttcaaaaaatttcccatagtacttcagtcaagactttttaggtttatcttttttttttcatttctccttttccttttccattatttttcgatgggggggttgttatcattgactgaagaaatattttgattgcaatggtctctctctctctccccctctctctctctctcctctattctttcctccttccctctgtccatcacccctcattaaaatattgaaatctggagtctttgataaatctgcattagaccaggctatatgctaggaatgaaatctgggcaaatatcgatgggttttcaaagaatgctccatgttcattgggccctttcacaccccacagtgataaatgaaaaggatagaggtagttttttcaaaagagcactttaataatatcctctgagacctaatgcagtttaacaaatgactccacctatttttccagtaggtaaattgactgagacttgcaaaatacccctgagagttgtcaggggtgtcttctgcctggtctatagcgtgtgtgtttgctttgtatctaacaggcacattcacgtctcgtgtactcatatgaagtatttcctaacattcccattagcctgtatataagaatcagaaagataatcccaacatgttgtaaatgaagatgtgactctataacctttctcttcttcctggaaaaaaaaggacattttcatgcatattttaaacagaaattttgtatatttaagtgtcatagaaaatatttattgagtaactgggacacaaatgggaatttaattgtcatcatatgctttgtgtgtggggatgcttaccaacaccatgtcgctggaccattgtggcaagccataactgcacaaagagtacacatcgtcagtgtgtgtgtgtgtgtgtgtgtgcgcgcacgcacgtgcgtgtgtgtgtccctgcatgtgcaacatgtctagcttgctgtccttcatgggattttagctttcccttcttgaaaaacattattttacagttccaggaggccctggttacattactatatgaaggcagtgatttgaaatgaaaattcctttcctcttggaagctttggtcataatatcatggttcaattaaacggattccaccggactttgtgatgaaaaaggctctgttaaaatccaattgagtttccaagaggaaattgtagtaggtcaagatgcatgagagggaagatggaggccacctcagctggagaacatgagctgagttgagccctcagtgttgaagttgacttgctccaagctgcagtctaaaaccctggggcccgtgcctggcctatgctccctcccaagtaagtagaggagcagaaccatcaggaacagcctgcctggctcctatgaagaaaacttcctgacgtcctgtccccaaaggaagaccctttccccaagggcaccccaggtggccattaaattgtgatgatcattcagaaagtgcccccttggctttatgagaatccaattagtcttctgaaccaccttttcttgggtgcagatttccaacattcatgctcattgcagatccaccaactgtcactgttcttaacaagcatgctcgtcttgtcagaatttcagtaagttccaatttcctgtacagaccagggtaaactgttctaaaatcaatcaattaatgaaatgttatctggtttttaaaagctggtttcatgtgctttatgtgtataaaactatatctgcctgtgtggctttgcatttcaaatgtgtggcgcacaagcgttttgttggtgctttgttctcagtacagtaactctgtgtacaaacattttaatgtggttttgttgttttccaacaagatgtctctgtaaaaatgatattggctgagctggtgcgttggtttctctcatagaggcattaactatactgccaatgcattgaattatttaaaaatgcaaaataaaatttttatgaaaatctc

SEQ ID NO: 17087 - DNA, 346 bp, Homo sapiens
caagtgtgggctcctgaaaggaatgttccagagaaaccagctaaatcatgacaccttcaatttgccatcatgacgcagacctgtatacattaggttaaatctgaatttccactgctttggagagtcccacccactaagcactgtgcatgtaaacaggttcctttgctcagatgaaggaagtagggggtggggctttccttgtgtgatgcctccttaggcacacaggcaatgtctcaagtactttgaccttagggtagaaggcaaagctgccagtaaatgtctcagcattgctgctaattttggtcctgctagtttctggattgtacaaataaatgtgttgtagatg

SEQ ID NO: 17088 - DNA, 574 bp, Homo sapiens
gcaccagccgcagccggggccaaagtttgtggggtcagggccccatccagcagctgccctgccccatgtgacatgaggcccattcttcgctctgtgtttgaagagagcaatcagtgttctcagtggcagtgggtggaagtgagcacactgtatgtcatctctgggttccttgtctattgggtgatttggagatttatccttgctcccttttggaattgttcaaatgttcttttaatggtcagtttaatgaacttcaccatcgaagttaatgaatgacagtagtcacacatattgctgtttatgttatttaggagtaagattcttgcttttgagtcacatggggaaatccctgttattttgtgaattgggacaagataacatagcagaggaattaataatttttttgaaacttgaacttagcagcaaaatagagctcataaagaaatagtgaaatgaaaatgtagttaattcttgccttatacctctttctctctcctgtaaaattaaaacatatacatgtatacctggatttgcttggcttctttgagcatgtaagagaaataaaaattgaaag

SEQ ID NO: 17089 - DNA, 605 bp, Homo sapiens
gcaggagttgcagctagggccagtggggcaggttgtgggagggcctgggccagtgcacgttccagggccacatccaccactttccctgctctgttacatgaggcccattcttcactctgtgtttgaagagagcagtcacagttctcagtagtggggagcatgttgggtgtgagggaacacagtgtggaccatctctcagttcctgttctattgggcgatttggaggtttatctttgtttccttttggaattgttccaatgttccttctaatggatggtgtaatgaacttcaacattcattttatgtatgacagtagacagacttactgctttttatatagtttaggagtaagagtcttgcttttcatttatactgggaaacccatgttatttcttgaattcagacactacaagagcagaggattaaggtttttttagaaatgtgaaacaacatagcagtaaaatacatgagataaagacataaagaaattaaacaatagttaattcttgccttacctgtacctcttagtgtaccctatgtacctgaatttgcttggcttctttgagaatgaaattgaattaaatatgaataaataagtccccctg

SEQ ID NO: 17090 - DNA, 2173 bp, Homo sapiens
ccgtccaagaacaagtcacctccaagtgtagccggatcaaggcaagccccccatctagcaagcacttgatgccacccagaactgggcttcttcagaacaatctgagtccaggaatgatcccactcaccaggcaccagagctgcgagggcatgggagtgatctcaccaactctggggaagcggcaaggaattttcacctccagcccccagtgtcccatcctctcacactcaggccagactcccctgggcagacttgactctgtctgccagcatatgcagagccccaaggccaccccaccagaagtgcccctgcctgggttctgtcccagctccctgggcacccagtccttgagtccccaccagctcagacggcctagtgtgccaagaatgcccactgcgttcaacaatgctgcatgggtcacagcggcagcagctgtgaccacagcagtttcggggaaaacacccctcagccaagtggataatagcgttcagcagcactcaccttctggccaggcctgccttcagaggccatctgattgggaggcacaagtgcccgctgcgatgggaacacaagtgcccctggccaacaaccccagcttcagcctgctgggcagccagagcctcaggcagagcccggtacagggcccggtgcctgtagcaaacaccaccaagttcctccagcagggtatggccagctttagtcccctgagccccatacagggcatcgagccaccaagctatgtggctgctgctgccaccgctgctgctgcttctgccgttgctgccagccagttcccaggtccgttcgacagaacggatattccccctgagctgccacctgccgactttttgcgccagccccaacccccactaaatgatctgatttcgtcacctgactgcaatgaggtagatttcattgaagctctcttgaaaggctcctgtgtgagcccagatgaagactgggtgtgcaacttgaggctgatcgacgacattttggaacagcatgctgctgctcaaaatgccacagcccagaattctgggcaagtcacccaggatgctggggcactttaaatctgagcaggatgcccatagaaacccccatggtgacatcactctaggaagtggtgtcgatccatacccgcagttgtctcccgttacaatttgagtggtgttgtcagcccatgcttatccctctctctacctgtgacaaaatggaaagctggtgatttttcaagctacgtgtacatatttgaaaattttgtaaatggttttcctaaacattaatgacagaagtatttatacttcattttgtgactttgtaaataaagcgacggcttttgtttcagtagagttgtgtttactatgcattgttttgtgtttattatacaatgttacaaatatgcagaccgtgttgtttgctccagtgataccttgttaagctaggtggctgagtcgcttatggttttaatgcaatgagcaatgtggatatgaccaagagttgttgtgcaagttgacaaatgccaaatagaaaaccacttggccatttatttctatgttcactaaaaatcctattgccttgtgtgattcttaatctcttttgcgaacctttcagtctccgctagctctttcctaatgagctttacagcagaagctgttttatcgttaagtgccccacagagacactttaccaggaggctgggagagttctccagatttgggagaggcgcagagacagtgtgtgagccgagccctgtctcagcaatccacctggaggagctagagtatcctcctccctttaccattcagaccgagagaaaaagcccagcttgtgtgcaccctcgtggggttaaggcgagctgttcctggtttaaagcctttcagtatttgttttgatgtaaggctctgtggtttgggggggaacatctgtaaacattattagttgatttggggtttgtctttgatggtttctatctgcaattatcgtcatgtatatttaagtgtctgttatagaaaacccacacccactgtcctgtaaacttttctcagtgtccagactttctgtaatcacattttaattgccacctcgtatttcacctctacatttgaaatctggcgtctgtttcaagccagtgtgttttttcttcgttctgtaataaacagccaggagaaaagtg

SEQ ID NO: 17091 - DNA, 1546 bp, Homo sapiens
ggggggaccctggcaccgcattagagctcgaaataaaggcgatagctgactttcatttggggcatttgtaaaaagtagattaaaatatttgcctccatgtagaacttgaactaacataatcttaaactcttgaatatgtgccttctagaatacatattacaagaaaactacagggtccacacggcaatcagaagaaaggagctgagatgaggttttggaaaaccctgacacctttaaaaagcagtttttgaaagacaaaatttagatttaatttacgtcttgagaaatactatatatacaatatatattttgtgggcttaattgaaacaacattattttaaaatcaaaggggatatatgtttgtggaatggattttcctgaagctgcttaacagttgctttggattctctaagatgaatccaaatgtgaaagatgcatgttactgccaaaaccaaattgagctcagcttcctaggcattacccaaaagcaaggtgtttaagtaattgccagcttttataccatcatgagtggtgacttaaggagaaatagctgtatagatgagtttttcattatttggaaatttaggggtagaaaatgttttcccctaattttccagagaagcctatttttatatttttaaaaaactgacagggcccagttaaatatgatttgcattttttaaatttgccagttttattttctaaattctttcatgagcttgcctaaaattcggaatggttttcgggttgtggcaaaccccaaagagagcactgtccaaggatgtcgggagcatcctgctgcttaggggaatgttttcgcaaatgttgctctagtcagtccagctcatctgccaaaatgtagggctaccgtcttggatgcatgagctattgctagagcatcatccttagaaatcagtgccccagatgtacatgtgttgagcgtattcttgaaagtattgtgtttatgcatttcaatttcaatggtgttggcttcccctccccaccccacgcgtgcataaaaactggttctacaaatttttacttgaagtaccaggccgtttgctttttcaggttgttttgttttatagtattaagtgaaattttaaatgcacagttctatttgctatctgaactaattcatttattaagtatatttgtaaaagctaaggctcgagttaaaacaatgaagtgttttacaatgatttgtaaaggactatttataactaatatggttttgttttcaatgaattaagaaagattaaatatatctttgtaaattattttatgtcatagtttaattggtctaccaagtaagacatctcaaatacagtagtataatgtatgaattttgtaagtataagaaattttattagacattctcttactttttgtaaatgctgtaaatatttcataaattaacaaagtgtcactccataaaaagaaagctaatactaatagcctaaaagattttgtgaaatttcatgaaaactttttaatggcaataatgactaaagacctgctgtaataaatgtattaactgaaacct

SEQ ID NO: 17092 - DNA, 590 bp, Homo sapiens
aaatatgtaatcccctggctgactaggactgttaaacatagtgtggactggatgatgccttcgacaaaccagagaagccaagttggggggagctggtgcctggagtgggccctgtgcacctcacctggcggaggctggggggggctctgtcagcaggaccctagaggagactctcattcgattttaaagaagcacaacgggtcattttcctttgtatgttcctagcgcagaactgtttctaaaacaacttgaagtatagttttgttatctaagcaatttttgttttaagtaagtaagtgtactagaatgcgaagccgttatggttcaggtttttaaaaactggtacagtattgtatttgtctcatctgttgcactgtatttcaatcatctgtaattaaaatgatcatatgtttgctccctggtcttttttaagtaagtaagtaagtatcttagtagatttttcctttgaggaaaatcggtaataaaataacatggattgaatgtttactgtgcgtcaagcacagttaatatatgatgatgtaaagtaactaactttatgtgatttaattcattcagtaaattgtaaatgt

SEQ ID NO: 17093 - DNA, 2859 bp, Homo sapiens
agaaactgtttatctgtctccttgtgaatacttagagtaggggagcgccgtaattgacacatctcttatttgagaagtgtctgttgccctcattaggtttaattacaaaatttgatcacgatcatattgtagtctctcaaagtgctctagaaattgtcagtggtttacatgaagtggccatgggtgtctggagcaccctgaaactgtatcaaagttgtacatatttccaaacatttttaaaatgaaaaggcactctcgtgttctcctcactctgtgcactttgctgttggtgtgacaaggcatttaaagatgtttctggcattttctttttatttgtaaggtggtggtaactatggttattggctagaaatcctgagttttcaactgtatatatctatagtttgtaaaaagaacaaaacaaccgagacaaacccttgatgctccttgctcggcgttgaggctgtggggaagatgccttttgggagaggctgtagctcagggcgtgcactgtgaggctggacctgttgactctgcagggggcatccatttagcttcaggttgtcttgtttctgtatatagtgacatagcattctgctgccatcttagctgtggacaaaggggggtcagctggcatgagaatattttttttttttaagtgcggtagtttttaaactgtttgtttttaaacaaactatagaactcttcattgtcagcaaagcaaagagtcactgcatcaatgaaagttcaagaacctcctgtacttaaacacgattcgcaacgttctgttattttttttgtatgtttagaatgctgaaatgtttttgaagttaaataaacagtattacatttttaaaactcttctctattataacagtcaatttctgactcacagcagtgaacaaacccccactccattgtatttggagactggcctccctataaatgtggtagcttcttttattactcagtggccagctcacttagggctgagatgaaggagagggctacttgaagctactgtgtgattttgtttgtgtctgagtggcattcagatgaagtctggaggagttaggagaacgacataggcaaggttcagcagccttccaaggtataggaaggtgggtgattaggactgaggctatctaggtttaacttttgtcccacctccaccccctattttgtggggccaaatgcattgctaaacagcaatttcagagtgtatggtgtgtcaaaaattaaggccttattgtttttctctttcacccctaccccccgtgctcctggcacatatcacattatttgtggtgcccaacatttggggtcttgagcctgctgctggtctcctggatgccagtgagggtatgtgggatggggtggtggggtaggggacggtatcctttttttgctcctacttggaaacaccaaacaccccaaggaagatgataggctccatcttgggccacctgagctatagggcaggctaatggaatcaaccatttctgagcactaaatgtatcatgaaaagttgaatggcctgctcataagtttagctcattcactggaaatgtagattgatgttcaatgttaaactggaaggagcttggtttgtgtgtcagtggttatattagtgggtagtgtaacattttatccaggttggggtgaggggagatggccacagtagcaagtggtgacactaaataccattttgaaggctgatgtgtatatacatcattactgtccgtagcaatgaaggatacagtactgtgttgtgggtgagtgttgctattgcccagcattaatatttgggtgtgtatgtttgaggctatgaaacacgcaggagtgtttttgtgctattaattttaagagaaagcagctttttcttaaaattcactgttgagaaacttgcatgtctggaggcggtgtcctctccgccctgtcgggtcctggatgagtacgagttatggtcacggtcacagcctgatctcttatgtgttcatagccattcgctctcccatcagaactgtttgtcctgaatgtgttcctctagttctagaaaatgaccactaatttaaaaaactcggttgtgaggtttgcccagaggcacttgttccagaatttcccctcctgcttcagccatgtccttgtcacttggcattctaagctaaagctttagcttcccaattcgtgatgtgctaggccaagattcgggagctgttgccagcctcgtcaaatatggaagagaaacaacctgcggtcaaaagggagtgatttgttaagtggtgcgcgtctatctcataactagatgtaccaaccagggaagggccaaggatggaaaggggtaacttttgtgcttccaaagtagctaagcagaagtgggggagcagtttagccagatgatctttgattaggcaaacattgagttttaaagaggctgtcaagttgaggccacttggtccattagctggggcagcaagatcactactcaacgttttcacactgtggcaagattgctcttctagtggaataatgccctagtttctctgagatgatgtaagtggcatgatgttacctaaggcttaggcttagcttgatttctgggcccactgtctgtgttcttaagatgccaacctgttgctttttttttttttttcccccatttaaaaggatagtacctactccctctaaccacctcaccccattcttgaatgacattttatccttcggaaagaacaaggctgtgatgtagtgactattgtctgtgtctcctgtgtgtgtctgttcttgtcacaaatgtatttggggacgttggatgcattcattttctgtaataaagtttcttaatcactcttcccaaaaagt

SEQ ID NO: 17094 - DNA, 21 bp, Homo sapiens
aaaatgctctcgtaggtggcc

SEQ ID NO: 17095 - DNA, 4306 bp, Homo sapiens
agtgaacatcacctttttatagcattaaattcattttttaaaatgataaatgctggagggggccatctgatttgaataaagttgaaagaacatgttaaagtcagtcttaaggagtcacgtttgagtatgtaaattttgatctttctaatatgttggtttgtatattcagttttaactgtatgaatctgatttgcaaatgagaatttggaaaagttagttacaaagaaatatgttaatttaattagacaatactctggaaggaattttatcttctttcaacaaaacatgttttatagtattctgacttacggttgcttttgagttttactcatttggatatattaagatgcacacagtgaagcaaattaaactccactttacgctggaatgctttctttagcatgaaaataccaggtccttggatttgggattttaatttcctatggaaagttgcttaaattgtggacactggaattaatctgaatgtcactgaggaatttcacatgaagtgtaatccctagtcaataagaattatccattacattattttatgggaaaactaggctaaattacatccattcaggtaaaaggaccttagcttactgaaggatctaaagagcaaagcaaagatctcactactcaaacactcagcctgcttccttcaagtccccttgcaggccagctttgtgctttgcagaccaactttttaatgagatactttgcttcctcattcaacattgaagctaggcttcaattaaaaggttcgaggaagctccatttaaaattgttttttttactattttttaaaattgtagtgtatatgataggaatttgcatttaaatatgttcatttttgcatatgttaggagtggaaacaatctggaaaacatttttttttcatccaaaaagtattctccttgggcatatctgatggaaaaaaaccttgattttattttcgtatctttagtctgtgttctttctagttatttggtactaattatgtgcaatctaaaaacactcccacaagtatttgttttttaattataaaatcatagtatatgttctttgtagaaaactggaaaaatacatattcaaacaggaaaaaaaatcaaaattccccataatgttgccatctaaaaataacctctattttagttgatatcccgtattcatttttgaaagccattccttaatgctagtttgatacacactaaaagtttagcttacaagttcaaattctgccagcttttcctgacagctatttgcatttttttcagatgagtgattattggccattttctttttctttttctttattttatttatttatttttttgagacagagttttgctctgttgcccaggctggagtgcagtggtgcaatctcggctcactgcaacctctgcctcctgggttcaagtgattctccacctcagcctcccaagtagctgggactacggatgcctgccaccacgcctggctaatttttttttgtatttttttgtagagacggggtttcaccatgttgtccaggctaatcttgaacttgtgacctcaggtgatccacccgcctcggcctccgaaagtgctgggattacaggcgtgagctaccacgcccggccttattgaccattttctaaataagcacattctatctttattctcttaaaattcaaattttctgttactgataatcctaatactaggattcttgcttaagtatgtgaaaccattaccgatttgttgttcacatttattttttatgttgtgaaactggactaaaggaatagagggatgattagtcataaaagtcaaatagcatttgtgtttaactgttgagaaaagtgaaagatcagtatgattattatggaactgtttttaattcttgcttaaagactacaattttagtataatgacatttgagtctagggtagtatgtggtagatttctagatggtccctaattaagaagtattgttgtatttagaattgtccacctaatttctttttatataatgccaaggtatttcttgtgcttttgggatcttatgctgtttgtaaaatgttactgtccaatgttggattattgttttggtttcaggcatttgctgaataggtgatgatacatgggtatttttctgcaagtatttaaaccaggggcatatgcaaaggcagttgtaatttcctcttggaaaaagcgccaaatgtttgaaggttaaaatcaaatgctagggttgatatttaggcttataacaaaataggcttgttttcaaagcagttttttcctagagttttaactgttaactcactagtttgctgctgtttttaactatgttaaataacatatggtatttggcaaatagatttatttttcaaaatgtctcactagtttccttttacacaatgtatatacttcaagatgtatagaaaggaaagctacagttgagcccttatacatgttttaaggtagaaatatgttccctattgtttgaaaactgattgtaagaataacctcagttaggagatataacttgaagtgtcagtccaaactactgatttaaccctatttacggtaacacattaccttcctcacctcctgtttggccctggagaatgtagtcctttttctcatttgtgttgagaaatgaaaagtctgctgtagaatgtatctgatgtcattagttcttcaaatggataccattgtacatataacagtagaatttggtttggggttgttagtgaaaaaaaatttaaacctgccattaaaaatccccatgtttcatggaaatctaacagaaatacattgtaataattagaacattttgttttcttttttctttttttttttttcgagacggagttttgcccttcttgcccaggctggagtgcaagggcgcaatctcggctcgctgcaacctccgcctcccgggttcaagcagttctcctgcctcagccccctgagtacctcagatgacaggtgcgtgccaccacacccggctaatttttgtatttttagtagagacggggtttcaccatgttagccaggctagtctcgaactcctgacctcaggtgatccacccgcctccgcctcccaaagtgctgggattacaggtatcagccaccgtgcctggcctaataattggaacattttcatcatgaaaatgtcatcagctttgccaaaagaaacaaccaattgacttgtttggcgtttgttttccattttcatgtcaattttatgtatacagttagaatacccaaggagaccactaaaatcagttaaacaagtagggtatatacaaagaaagatgaaacccgaaagtacataaaaaggatttaaatccgattttagatgtacctagtgtgtatttcttatctctagacaagttcatgtttattgtttaatttatgcccaagtgaagttgtaaacttatggttcaactctgacacagaatttgtcacttgtctgaggtcagtggcaggtttctctgctgtcaagcactctgtgtcacccaccagattagtataactattaattcagactgtactcctatgtttaagataatttttacaagagctggctgaagcagcacattagtaacctgacaagatttctttttcccttttcagggggaaagggtcaccttaaaaataaattattttcagggactttgggaatctaatgataaatattacacataatctatgaatagcttaatcctttatatattccttaaaataggaattcctcgacatcactcctggccacactttccttgcctgtgttgttgctatgtgtatttgaaagtaatatctgcattccttttaagatgttctgtaagtcatatttgtcagttatacagagtagtcttccttttccccacgttcagtgtaatctcactgaacagtaataatagcaatagctaacaacatctgcacagcaccttacagtttgcaaagaacgttcacacattctcatttgagttttgcatagtgaacctgttacgagatgtctcttgacgtcgatgctaaaagtgttagaatctttacatcactagagtcattgaatatgctgtagtattgaatagtgccctgactagggggaggatttggatgtgctgcatttcaagccgtgtataatcatcaaaatggggggcttgagttctttagctacttgaatccgatttacttctgttaagtgatgcttttctaaccgttttctggatggattttgtattcactatattgtagcttgtaatttgtataaatgtaccatctgatgtcattaaaaaaagtgtttgtagtgcta

SEQ ID NO: 17096 - DNA, 594 bp, Homo sapiens
cagtactttcatgaccagtgatgaggggaaatggggggagggggcaggccaatgaggtctgcatggccaggggaccttcaaggtgcgtaaagtcccttggggtagggtttagtgggtagagacttatttgtttcctgataggttatgtttgtaattgtttgttaagcacagcctgtttcttggaagttatgctgtagaggcagcctgtgatccgtagtatgctagggtgtgacagcagccagccacagctggatctgatgtcttgtctgccccgcccagctttgcatatccatgttctaccacaggaaggtggcctgccaagagtctgctcaaagttttcaacataaagaataaagaaaaaaaaatgccaaagtgcttttcaatctagtaaatctagagggttgttttgtcttagccacaagaattccgaggtcttgaccctgatgatcaacctgcctcccctccatagtcttgttggagaagcccagagagaatgggactccaactaagggaacctgaaatcaactcaatggaggcacttcagagctaaaataattatggcttccttgcttaataaacattttcgttcactgc

SEQ ID NO: 17097 - DNA, 508 bp, Homo sapiens
tgggacgtttgtgccctgtcctggatgaacgcctctttccgaggtctcctattttctttttaactttttaaagactgtgccaccacaaaacagccttagcctccttgttgccaaataattccctaactgtggagttttaggaagtcagttgtcagagacaggtggggagggtgggggtagggaccacgcatgagtcgaagcccccgggaagagccaaaggccaaagtgcccaactctttgggatgacccccaagcctccaacatcctgtctttccatcaggaactggcttctcttatgccaaaggaataaccccattgagttgattgtggccagaatgtccacaggcctggcctgggggctgtgggactggctggaggcctgcctgtgtctagagctctgggcctcaggggtaagggaaggaagccagcctttcagcaccccttaccctccacagttctgtgatttctgtccttgcttacatttggaggacagggacaaggactgagc

SEQ ID NO: 17098 - DNA, 431 bp, Homo sapiens
tcgccccagcgcggcctccgtattggagccctccctgcttccccttctttctttcctctttccccaggccgccactgcccttgcccctttcatctcccagcagccctcaggagcgtcaggatcattttcaactctggttaggcctcctacctggggaggccaggtcactgcactgggaggtcctggctgctgcgaagctggaggaggactgcgtgggctgagatgccaccctttgaagggtgaacagcatggcggcatctgggccccacagtaacacctagtggcaaccttgccttcctgacctcagcggcccttctgttccatcctctgtgggcaggggtgtggctttgttttcctccctcgtttgcttccacctcgtgcacagcgctctgcacagacaacacgctcaataaaagttcagccatagcagc

SEQ ID NO: 17099 - DNA, 1066 bp, Homo sapiens
gacctggggcccaactgcctctccagcattggccttggccttgatcccagaagctagaggagctatttagatctccggatttacatgcattaccctcatgttccctgaattctcccaaaagcctctctgaccctgggtttttggcctaaacatccaagattccgcctccaagtttagcccaagtttgtggagagtacagactgcgttggctgggcttccgagagcttcggcctgcctaagtctgaggaagggagaagggggcagctgtctgccaggagtctggctcttttgctcatagcgacccctcccttggttctggcccccgctttttctaacatgtcttctgaatgcttcctttttccctgcacacgcatgtacttcgagcaccgactatagacatttagatcaggtacccagtgtctgtctcccacgacaggccaagggatgtgatagtgttgttgggagggggtagaagggtgcccactcagggttattcctcccccatcagatgctccagctcctgctctgtagattgatctgtctgtctgctagccaggatgggatctctgcagtcttctgtggaccaaggagatagacccggcttctggtccattccagggcagggagtgaggagcaaggcaactggcatttgtccacctggagacagaggtagctggcagctctggccatccctcccctatgaagagcattcctaaagaggccctgaaaactgctggtggtggggagactcttcaagttaatatctgcattagaggcacctatgagttaaaaaattcctttgaactatctgtggttattgctcaactctgctgttcacattctctccctcccttcattaatccctctcttttcaccatatggttgtccctcagtattcatcagggattgctttcaggagtccccatggataccaaaatttgtggatgttcaagtccctgatacaaaatgacgtcgtatttgaatataacctatgcacatcctcccatactttaagtcatctctcgattatttgtaacacctaatacaatgtcagtgctatgtaaat

SEQ ID NO: 17100 - DNA, 550 bp, Homo sapiens
gcatgagttgcagccagggctgtggggaaggggcagggctgggccagtgcatctaacagccctgtgcagcagcttcccttgcctcgtgtaacatgaggcccattcttcactctgtttgaagaaaatagtcagtgttcttagtagtgggtttctattttgttggatgacttggagatttatctctgtttccttttacaattgttgaaatgttccttttaatggatggttgaattaacttcagcatccaagtttatgaatcgtagttaacgtatattgctgttaatatagtttaggagtaagagtcttgttttttattcagattgggaaatccgttctattttgtgaatttgggacataataacagcagtggagtaagtatttagaagtgtgaattcaccgtgaaataggtgagataaattaaaagatacttaattcccgccttatgcctcagtctattctgtaaaatttaaaaaatatatatgcatacctggatttccttggcttcgtgaatgtaagagaaattaaatctgaataaataattctttctgtt

SEQ ID NO: 17101 - DNA, 81 bp, Homo sapiens
tcccccagtgctccagaacagcgggagcactgtgctgtgctcctttcagtttcttttgggtttgtttttccctctttcctt

SEQ ID NO: 17102 - DNA, 559 bp, Homo sapiens
gtctgagcacgagttgcagccagggccagtgggagggggtttgggccagtgcaccttccggggccccatcccttagtttccactgcctcctgtgacgtgaggcccattcttcactctttgaagcgagcagtcagcattcttagtagtgggtttctgttctgttggatgactttgagattattctttgtttcctgttggagttgttcaaatgttccttttaacggatggttgaatgagcgtcagcatccaggtttatgaatgacagtagtcacacatagtgctgtttatatagtttaggagtaagagtcttgttttttattcagattgggaaatccattccattttgtgaattgtgacataataatagcagtggaaaaagtatttgcttaaaattgtgagcgaattagcaataacatacatgagataactcaagaaatcaaaagatagttgattcttgccttgtacctcaatctattctgtaaaattaaacaaatatgcaaaccaggatttccttgacttctttgagaatgcaagcgaaattaaatctgaataaataatt

SEQ ID NO: 17103 - DNA, 555 bp, Homo sapiens
gtctcagcacatgttgcagccagggccagtgggagggggtctgggccagtgcaccttccagggccccatccattagcttccactgcctcgtgtgatatgaggcccattcctgcctctttgaagagagcagtcagcattcttagcagtgagtttctgttctgttggatgactttgagatttatctttgtttcctgttggaattgttcaaatgttccttttaacaaatggttggatgaacttcagcatccaagtttatgaatgacagtagtcacacatagtgctgtttatatagtttaggggtaagagtcctgttttttattcagattgggaaatccattccattttgtgagttgtcacataataacagcagtggaatatgtatttgcctatattgtgaacgaattagcagtaaaatacatgatacaaggaactcaaaagatagttaattcttgccttatacctcagtctattatgtaaaattaaaaatatgtgtatgtttttgcttctttgagaatgcaaaagaaattaaatctgaataaataattcttcctgttc

SEQ ID NO: 17104 - DNA, 308 bp, Homo sapiens
aagaccaccgcttcaaaaaaacctgaggaatggagtgggccaacactatccagccactctgaccagccgaaccaggaactcaatcaaaatgcgccacagcaggaccacaagggcaaggagaccaccgccttctccagtgcttccttgggcagccagtaattcccaggcaaggccagagacttcaagtctatctgaaaagtctccagaagtctaaccccagataaatagccaacagggtgtagagtacgttttacaccccaaagggtatgccccatggtgatagaaataaaatgaacatgttgtaaaat

SEQ ID NO: 17105 - DNA, 308 bp, Homo sapiens
aagaccgccgcttcaaaaaaacctgaggaatggagtgggccaacactatccagccactctgaccagccgaacgaggaactcaatcaaaatgagccatagcgggaccacaagggcaaggagaccaccaccttctccagtctctcttcggacagccagtaattcccgggcaaggccagagacttcaagtctatctgaaaagtctccagaggtctaaccccagataaatagccaacagggtgtagagtacattttacaccccaaagagtgtgccccatggtgatgaaaataaagtgaacatgttgcaaaat

SEQ ID NO: 17106 - DNA, 28 bp, Homo sapiens
tgatgaaaataaaatgaacttgttgtaa

SEQ ID NO: 17107 - DNA, 247 bp, Homo sapiens
gggacactggaggctgggctctctcgacacgttgctcagccagtcactccttcccctgtggattgatgaaataacatcctttgaatgagtttgctctgagcctgtgactccttctgctaggcagagagcgcaccctactctttccgtgacgatgagggcggcaaaaacagacatttcttccttcatggaactggatttggatttcttgaagcaggcagcttcatattataccgatttgttctctgtc

SEQ ID NO: 17108 - DNA, 2205 bp, Homo sapiens
cgaccccccaccgccaggctgatcagaagctgatgactcgtggacaaatttggctgtccccagttttgccccaagttgctgtctccccttccctcacctcctccctccctgtttgatttcttcatgcttttgcccttctcaagttgaagttgcatacatccaatatcgtatcttaatgatgctatgataattgcttgtgtgtgtagcttcttgtagcttagaaagcgctttatgcccatgatgtcatttcaggctcaaccaaagaggatcaaacaggaattccatcttggcttccctaagacagattggctttctaatgagtttaagtgggcagaagtgtagggttcagtgtgtcctgactcccttgaggcttataatgggccaagttgaagactgttgatgatccctggtgggtaaattgcagacatcaaatgctagggattggcataggctagtgtttagcttgtctatttgccatatctattttttttaaatttccatacacttgtaaaagtagttagttgcttttgattgagttatatagcagtttttcatttggtcttccactcacctttcactatatttgagtgttcccttacaggtatgttggcatgtgttggaaaatttacacaattaggtttaaattcagtaggatgtgattttaggatgctactgatcaaagtgatatctgtgtctgttggaatcttgatagctgattaatttgccctcaattctgctccctgaacttcacacataaatcttcccaagtgggttttagggtgtatagatcccagcaggattaaggaggtggaaaagcagctaacatttcttgaggctctaccacatagcaggcactgtcacagagtaatggcattaatccccataataatcctgtgaaggtgatattctcatcccatcttagacatgaggatattggaactcagagaggtggctattgcattgcgcagaacgctacagagcccatgctcttcccagagcagcacccacaaaagcaagcattgattttgtgctcagtgtgtgccaagcactgtgcagagggtacacagttcctgccaggttaacaccctcccttcaggcctcccaaaggcataggcttgcaaagagcagaaggtgtgaaatcacactcttcctctgggcatcctggatccctgaattatccccccccccatgaagtacttcaagggccaagctgcccctttccctcctctccgcccatgaaaatgcctccaaactgagatgctttcagctgagaacagatttgactcacagacattaccaaagaggagcttgtgaatccaggaaaagctccagggggctagctgatctgagcagagagctttcagtgacccattttcctgtctagactctgccttaagctagtggcaactgctggggccccaggtacttgggacatggaaactcgttggatggctgggcagatgtaagcctgtccatgcagtcagccgatcctctgctcaggttcagctggactctgccatctgtgggcccagcatcactctgtaagttccttgaaaggaagaacaaccttagagtatttctgatacaaaatgagggcctctgctcttgatttaattataaaatgtctacgtctttctccagtttctgagccctatgcacattggcttgtgggcttgttcttcctgccaaatgatcagagaggaacattccatttatttgtagtggatttcctctggagggcatgtacccacactaaataccaactgctcttcctcagctgtagtccccaacatcagacttggcacgtggtggacactaacacacaggcactcaatgaatgagtgaaggaaataaaagtcaccccgttggtgagaggtgctatccctgagtctcagtgcaggaccagtggatgaaaggcaaggtaaagaggcccaagataggctggcttcccccgttcaaggtatagtctgcctttaagggagttttagaaccaacatgcaagacattgaaagaaatcttgcaagagccattattgacttagatccaaaacagcctctctcatgtctaaaaaggcacagaattttgcagatctgaggaagagggatgcattacctttttgcttcttttcaattgcttagtgtttctaatcatacttaatccacactaatgtgcgcaattataataaatggtaagatatcacatgtg

SEQ ID NO: 17109 - DNA, 2023 bp, Homo sapiens
gctcgggagaacagggcaacatttcctaccacaggccaaggagacaaaagagatattggaaggaggggaaagagaagcccagacaaacagcagatgagttgagtggggcagagggacagggcagccagaccaaggccaagccttctcacccttggccagctggaagggacttcagcaaccaagaccacctggcaacaggctcagtgggggtcaggtccaggtccccgaagaggtgctggagaggaaagcagggagccactgcatccagcacatggggtgcctgggcctcagatggggaccccaaagaagcagaagctgaagaaggtacggctgggggttctgtcctgctcatccaaccacccctaaatacccaccctgtggactttgagctgaacatgcccactggcccccaggccacatgggacctggaggagcctacctggggcctgcccctgccagcaggtgccagggctggtgaggaagagctggggggcagaggtaaagccctgcaggggaggccacagggtccatcccgtcttcaggatcatctacactgcactaggggagccccaggaaggcagcaccctggaggccctgtgccagtgaggacaggagaccctaaggccccgggagcccagtgccagccagaggttgtgcaggcaaggagaccaaagattgatgagaagacccccagcaggggtactgggtacccggcaggccagtgccctcacagttgacttggaccagggtggctgtgaagggaagtctttgttgcaaaggaggaggaggaaaagggaggacttggtagggttttgtttcttctgcttgtttctgtacagggccaccagactcctggagagatcaagcaaggagaacctggggctgccatggccaaagcaactcaacagatgccaatgccaattccaaggccagccacaaccctgccaccttggggaatccagcctggaggcatcccctaagcagccagccatggcctgggtggaggcacctgaagacgtctgtcccaaactcccccagccctgagctgggagatgacagggggaaagaggccctctcaagggtgccagatgcctgggtctcccaagaggggtcccccaactcaccgttcccgggacaggctgccccctgttccaggaagctcatcctcacctgtgtaggcccctgtagtgacccacgcgtccagcagacgcccacccaccgctagccgttgttcctgtgcaaagtagtgtgctatgcacccacccaggtggccgcctctgggcccaaggcacatgctgtgagcttcctgtgagcccaggctctgctcactgctgtcccgcgtcatgagcaccacctctgctttccctgtgtagatctaggccagtggctgcttgttcttgtggagctgtgtgtgttcttctctgagcagctcctccccggagtcccccagcacagtcccaggagatgacaggaaggaagcaccagggcaaggcggacgctcaccctgtgaccacgatggtgaccgtgactgtgggaggaagaactggacccaggacggagcggggctgccctgcctgaggctcccgaggagctttgtgctttggtgttccacccctgttgttactcatgactcagtttccttgacctggtagggtgttccctgctgtgttttccagtgtcctgtgactgtcctgtgcgggccatagggcagggccctgtcccagcagatgggcttgggagggggctccctaaagccagtggacactgccagagtctaccttcctggcaagaggcagaccccggggccctcaggaaggagggagttggcagcgggggctgcagcaggagtaggagcagatgaggcgtcttgccaggaacctcaggaggagggggcccgggacctgtgtgggacctgtgtcctgtggtggccgtttgcagtttctctctgtgttgtgattcccttctcttcaacgttttcagtacgtgtttctcttcaataaacttcattcagtgttccagccgg

SEQ ID NO: 17110 - DNA, 756 bp, Homo sapiens
gttggggctggggaggcagcccagcgcgagtcctccccgggcaaataggctccgagggccccggggcctcctctcctcctctcaggcagcagggccctggagacaggcggaggcggggccagggccggtccctcaccccacatcgggatcggggccccccacttccccccaaggggccctgcccaccaccaccttcccggtgacccagatgaccacatttaataccaaatggggtggggggaggcgcccctccagtgccaggggcacgtgctgtgagcttcctgggagcccaggttgtgctcactgctctcccgtatcgtgagcaccacctctgctttccctgcgtagatctaggccaggggctgcttgtttttgtggagccgtgtgtgttcttctctgagcagctcctccccagaggaccccagcgcagtcccgggagatggcggaaagaaggcaccagggcacagtggacactcatcccgtgacagcgatggtgaccatgactgtgggagaaagaacaggacccgggatggagtggggctgtctgagtttccccagtgaactttgtgctttggcgttccacccctgttgttacttgttactgagtttcctagacctggggtgggtgttcccccaggaggaggggggtcccgacctgtgtcctgtggtggccatttgcagcttctgtgttgtgattcccttctcttcaacggtttcagtacatatctctcttcaataaatttcattcagtgttcc

SEQ ID NO: 17111 - DNA, 1101 bp, Homo sapiens
aggcagctgcagccaccgcggggcctcagtgggggtctctggggaacacagccagacatcctgatggggaggcagagccaggaagctaagccagggcccagctgcgtccaacccagccccccacctcgggtccctgaccccagctcgatgccccatcaccgcctctccctggctcccaagggtgcaggtgggcgcaaggcccggcccccatcacatgttcccttggcctcagagctgcccctgctctcccaccacagccacccagaggcaccccatgaagcttttttctcgttcactcccaaacccaagtgtccaaggctccagtcctaggagaacagtccctgggtcagcagccaggaggcggtccataagaatggggacagtgggctctgccagggctgccgcacctgtccagacacacatgttctgttcctcctcctcatgcatttccagcctttcaaccctccccgactctgcggctcccctcagcccccttgcaagttcatggcctgtccctcccagacccctgctccactggcccttcgaccagtcctcccttctgttctctctttccccgtccttcctctctctctctctctctctctctctctctttctgtgtgtgtgtgtgtgtgtgtgtgtgtgtgtgtgtgtgtgtgtgtcttgtgcttcctcagacctttctcgcttctgagcttggtggcctgttccctccatctctccgaacctggcttcgcctgtccctttcactccacaccctctggccttctgccttgagctgggactgctttctgtctgtccggcctgcacccagcccctgcccacaaaaccccagggacagcagtctccccagcctgccctgctcaggccttgcccccaaacctgtactgtcccggaggaggttgggaggtggaggcccagcatcccgcgcagatgacaccatcaaccgccagagtcccagacaccggttttcctagaagcccctcacccccactggcccactggtggctaggtctccccttatccttctggtccagcgcaaggaggggctgcttctgaggtcggtggctgtctttccattaaagaaacaccgtgcaacgtg

SEQ ID NO: 17112 - DNA, 2926 bp, Homo sapiens
ctcgctctatgaaggcctggagaaaccagaatccaagacctccattcacaacttcatggccacgcccgagtttctgatcaatgactacacccacaacatcccgctcattgacgacacggacgtggacgagaacgaggagcgcctccgggcccccccgcccccgtcccccaaccagaacaacaacgccatagacagcggcatctacctgaccacgcatgtcaccaagtcagctacctcttcagtgttttcctccagtcccgggagcccgctccacagcgtggagacgtccctctaacaagaacttgtctcagcacatgcgcacacgcacactcggactcacacgaagtcacacgcacacatgcacgcacacacacatatggggacctgcacacctgcaaaacgagggaacaactaaggtggctgaagacctttctggcagggcatttgcaaggacccaaatccattcaacaagggtgcagcctgccacaggctcctcatccggactgaggaagacgaggacagggaggaggaaaaggaggaagaggaggacaaaaagggggaggagaaggttcttcgtccaaaggaggaaggagaagaagtagaaagtgcgaagagctgagttccccacctttttttctattgatgcttcttttttaacaaactacagttttaccgtgtgtttgccatttgagctgtgtggtgggcagggggctggtttgggtttatggggagcttttgttgcacccatgcaggggcaatcagatcagcatcttcatgcaaaaaaaaaaaaaaagttgagtgctctgcaggcctgtgaagggtgccacctgagggagccgcctgcaagcggccctgcagccacaaagcaacccgccctctgcaaaaactaggcacatccgcagtgcgcatgtgtgtgcgtgcatgcacatatgtgtatgtgtgtggatctgtacacacacacgtatatatggccagatgcgtatttcaataaggaactatttactggcatgatatttgcattcctcttatcaggcattttcatttggaaatttcattattgaatgtagcaaggttgtagttgtttttttttttttttcagggaactagactgcaagaatatctttctggtcaacccatttttgtccctcatcaccccgcccccacctttcgctcctgccctctgcccggccctactgagattcccaaggagaaggccgagagggggcgctccaggtctggagcaggtataattggagcatttgcactgagacccctgccagagaggagaaaaccctttcaagggaaattttaatctaaaaggaaaaaaccaaaatattgatgagaaggagtcctccagttagtgaaaggggagtttcgttttcagctttctttggttcctactccaattccacatccttcatcctggccatgcccccaccttcaagagcatgaagcactcttggagttgtgggtcctgcccagagtccagagagcagcctcagctgagcacaggtccgagggggcgggggcagggccaagagttcaaaagaagccaatggagggagagggagcgtcagaagcccggaggagctggtggtgggagaatgacggcagggacgcagccacagttcagaccctgtcccctcagcacctggatggactcccactgtttgctttggcaaatgccgaggagtcctcggtagaccaccttgatgtctgctgtgacatcagaggtgccaccaccaaagcactcttcccaccctagtctttgtgtccagcggccaagcttaagccatgaagtcatggatttgtggctcagcaccaggtcctgaggggagcgtatcctggcagtgtgggcacctggtggccaagcctcagtttcccccaaatgagcaaaggggataaagaggggcccgacttttgccaccctcctgaggaagcccctaggtccacacagtgatgccatgggggacccttgccttccacacttgcaggtgtcacgttttgcagggaggtgtttgggccttgggctcagccactgggagacagttgggacctgagggacagaggatcggaatggaaaccaccaacgtgcactggcaccctcagaaggcttgtctcacctccaccggcatccacacaaaaccaaacaggagcaggcgtcatccccactattcccatgaatgccatgtcacccctgagcagaagcagtcaaatcttgggcaaaagaatttcggttagaaaagaaaatcccactttaaaatgccagctgcagataactcaaagccatcccttttttctaaagggcacattgagaatgtcacccatttgtaaactgttccctgatgtccttgtttaaacgataataagaaaaagggcaactccatttgttgagggtctttgtgttcttcaatgagaaatcaaatttgagacgttgaaattggagctgcgtgctgctgcactcaccggcttcttctcactctctgtcgtagacacaccgataggaccaatggccaatagatattaaaagcaaaccctcactgctgctgtataaagttgcctaatgtaaatgtctattgtttagtccctaggtcacctttgtgctgtgctgtggagttcagaaacggggtaccatgacctggaatcttttgctcttgtttttgcagtcttcaaggctgggggccctgtctcattgggaagcccctctttataaagcattatattacttggaatggcttggtcaactgtgttcagttcataaatatgttttacatttttatctgcctgttataaagatgaacaaaaaaacttaatgagaaagatcacagatacgtaataatttaaagtctgtagttgaatttcctaacttaaagaatagaccaaaatttctgtgtataaaaaaaaatgaaaggctccttacatcctg

SEQ ID NO: 17113 - DNA, 1016 bp, Homo sapiens
ggccccgtggccggcaggccggcccctgccccacccccacccacgggtgtccctgcccactcgtgtggcaagggaggggagggcaggagggctcggcctgagcagggtgctggggggagagcgcaatacctcacgcgggctgccgtcctaatcaacgtgcctatggcgggaccacgctcggagcctgcctcttctgcgactgttactttttctttgcgggatgggggtgggggttccctctccaggtggttgtccaggcccatgtcccggccctgggtgctcagccagctcggctaggccctgcgcctccctgcgcttcccccttcaggaagggtgtgtgccacctcgttgcactggatcccagtggctgcttgggggagaggcgtttgccatcactggtgttgtcacctccctgtttctccaccaagggcttgggcctctcggggctggggcctcccaggggatggggacccagagtgcagtggccgcccacatccatggcctaggagctactgggcaggttcccggccacacatctggtgggctgttttgttttttttttttcctcttcccccagatgtcttgacgggatcactggggctctttgtgagtgagggtggccaaactaccgccggaggagatggggtctcagagcgagagctgcggagggggaggggaagaagaaggcctcacttttgctgctgcggggcccacacagccgctgctactttggggggtggggaaggggccaagctgcagacacacacagtcattcatttctgtccacacccctgtgggtggcgggtgtgcgtgtgtgtgcttgtgtgtgcgcacgtgtcggcgctcacacacacatgctagcccactgatgcacccagcccagggctggcagtctttgcagcgtggggccgtctcaccctggagcctggagaggatctatgcttgtttgtttttgtaatccatatcatagttgctttctttaattgttccttctgaataaacagtttatttaagat

SEQ ID NO: 17114 - DNA, 1371 bp, Homo sapiens
caactcagctcacatcaccagctcacctctggtagccatagcagcccctgcttcagccccaccgcacccctccagggggcctgcctttccctgacacttttggggtctgcctgggggaggaggggagaaagcaccatgagtgctcactaaaacaactttttccatttttaataaaacgccaaaaatatcacaacccaccaaaaatagatgcctctccccctccagccctagccgagctggtcctaggccccgcctagtgccccacccccacccacagtgctgcactcctcctgcccctgccacgcccaccccctgcccacctctccaggctctgctctgcagcacacccgtgggtgacccctcaccccagaagcagcagtggcagcttgggaaatgtgaggaagggaaggagggagagacgggagggaggagagagaggagaagggaggcaggggaggggcagcagaaccaaggcaaatatttcagctgggctatacccctctccccatccctgttatagaagcttagagagccagccagcaatggaaccttctggttcctgcgccaatcgccaccagtatcaattgtgtgagcttgggtgcgagtgcacgcgtgcgtgagtacggagagtatatatagatctctatctcttagcaaaggtgaatgccagatgtaaatggcgcctctgggcaaaggaggcttgtattttgcacattttataaaaacttgagagaatgagatttctgcttgtatatttctaaaaagaggaaggagcccaaaccatcctctccttaccactcccatccctgtgagccctaccttacccctctgcccctagccaaggagtgtgaatttatagatctaactttcataggcaaaacaaaagcttcgagctgttgcgtgtgtgagtctgttgtgtggatgtgcgtgtgtggtccccagccccagactggattggaaaagtgcatggtgggggcctcggggctgtccccacgctgtccctttgccacaagtctgtggggcaagaggctgcaatattccgtcctgggtgtctgggctgctaacctggcctgctcaggcttcccaccctgtgcggggcacacccccaggaagggaccctggacacggctcccacgtccaggcttaaggtggatgcacttcccgcacctccagtcttctgtgtagcagctttaacccacgtttgtctgtcacgtccagtcccgagacggctgagtgaccccaagaaaggcttccccgacacccagacagaggctgcagggctggggctgggtgagggtggcgggcctgcggggacattctactgtgctaaaaagccactgcagacatagcaataaaaacatgtcattttcc

SEQ ID NO: 17115 - DNA, 989 bp, Homo sapiens
cacaaccgtccccggcccctgccccgcccccaagctcggatcacatgaaggagacagcagcacccacccatgcacgcaccccgcccctgcatgcctggcccctcctcctagaaaacccttcccgccctcgggaaagtagatgtggagggtggcgccctgcgtaaccctcgccctgtccctcccactccctgggggcgctgttccacagtgactgggccctgtccagggcagtgagtcctctactttgctccgtggaggaagctggggtacaaggggcccagtgctggccacacagcagcgcagccgagccccaggagcccgtcaggccacagcccctggcactgcaggtggcctccctccagagactcgagtccccatgattccctcctcgtcagtctctcaaagaccccatggtccatcccctgagggtggtcagccaaggctcccgttccgtgggatgccataaaagccgcccagtgggacccacagtcacacagagcgcctcacctgcatcctctcccccacaagagccccaaagatcccacgggagaggggagagggacgcacagcactgcctgccaagcgagaatgcaggccccgccccctcggcccctcaccacctctttctacagcctaatttattggattccctattcgtagccatctccgtggccaatgtgactaccgtgccagcagcgggggcggcccagcctctgagtcccgtggggccccggctcccaccggtgccaaacccagcccctgcggccgtcaccccgccagcctacactgccagccgccaccggggcacacgggcctctgcttgccagccaggagtgcggacaccatgttcccagctcagtgccaaagaggggtcaccagggggagctgtctgcggagccagcgcctgcccgagagagaccccaccgccaccgtgtgcctttcccgggccctcagccctcgggccgggcaccacccccagtccccccagt

SEQ ID NO: 17116 - DNA, 301 bp, Homo sapiens
gctctggctcagacagcagcaagccggatccaccaacaccgcagcgccttatgaccccggaaccgagccagccactgaggggagctggcagagcctgggggcacagggtgcaaagccaggcactgtgcccagcagtgggctccctgcctgccacctcccctgccagcccacccaccttccccccacctgagattgtttctaatttataaggatccccctccttccccctctccccattgtatttatttgcctgctggaaaatcacatccggaaataaaatagaaatatgtctttttatttt

SEQ ID NO: 17117 - DNA, 211 bp, Homo sapiens
gcccggctgtggctccacctccagctctccgtgccttaagggaaaagcgggacagctcccaccaccctgctgggcgccagttctccacaaccacagggcagagagacgctggagccaggcccggctctcagagcgtgttctgcctgagacccccgtgagggctctcggagaaagtgtgtgtattcctttcttaataaagtgtggactgaac

SEQ ID NO: 17118 - DNA, 65 bp, Homo sapiens
gggcggcaccccagccctgcccttgcttccttcaataaacatcacaggacctgggactgcacagg

SEQ ID NO: 17119 - DNA, 457 bp, Homo sapiens
ggagctgttgggtgtcttgcctctagaggctttgagaagctcagctgccttcctggggctggtcctgggagccactgggagggggacccgtggagaattggccagagcctgtggccccgaggctgggacactgtgtggccctggacaagccacagcccctgcctgggtctccacatccccagctgtatgaggagagcttcaggccccaggactgtgggggcccctcaggtcagctcactgagctgggtgtaggaggggctgcagcagaggcctgaggagtggcaggaaagagggagcaggtgcccccaggtgagacagcggtcccaggggcctgaaaaggaaggaccaggctggggccaggggaccttcctgtctccgcctttctaatccctccctcctcattctctccctaataaaaattggagctcattttccacatggcaaggggtctccttgg

SEQ ID NO: 17120 - DNA, 347 bp, Homo sapiens
acccagggaagaacctgctgaaaaccgatgacccccagcattgaaatggactctgagatggcagcgtggtgccagtgtcagacatcctgtgtgtgatgatatgcactgatcacacaagactgccctttcctgagaagctgcgggcttcggtgtggaggggtggagtgctgtgatctcgacaacttactttcaaagacataaagcacagatctccgcacaggggatgtgtgtgttcctgatgtaatttgcataacttttctgtagtttgaaatgtttccaaataaatattggcaaggggagtggaaatgacaccaagaagcccctcatgctcatggttggacagagag

SEQ ID NO: 17121 - DNA, 104 bp, Homo sapiens
ggtctgcctcctacccatcccgcccaccggggctttggccacctctcctttccccctccttctccatccctgtaaaataaatgtaatttatctttgccaaaacc

SEQ ID NO: 17122 - DNA, 660 bp, Homo sapiens
aatagctgttagctttggtcttttggcctctttaccctgtgtttatgtttgttccaaaaccatcatttaaatctctactgtcacattttgtttcttaaaagcaaagccagctaacaccttcattcatccctagttcggaaattcaagctaactacttaccctttaaactgtcactgcatatgcaagtaccgctctaatttttggatcattaaagggagttacacaacttttaagtgaaaaaaataggtaacaaaacaaccacctgatagtaagttttctgataagactatagataagtggtagaggtaatcaattcttccgaagtgtttccttcgtgaataactggtagaggtaatagttttttcaatgtatttccttcatgagtaaagaaaatgtggattgaagtatagattccagtagcctagtttccacagcacgataacaccatgacgcctactgctgttcccaccttgggattctgtgtgctgccatcccacctgcagctgccctggaattcccttcgctgtttgccttcatctccctccacgtttgagaggctgtcaggcagcagcgaaagcttgttaggatgtcctgtgctgcttgtgatgagagcctccacactgtactgttcaagtcaatgttaataaagcatttcaaaac

SEQ ID NO: 17123 - DNA, 324 bp, Homo sapiens
agggagccatgagggtctgggcttcagagctaggtctttggggaagtcctggctgactgccttagcagtgggggtgggggtgggggcaggggcaggggctttatgtgtttttgcttggggggcgctgggcctagcccagagtagtgcttgctccccctgccttgtcccaccagggaggcagcagactcaggccctccatggtcctctttgtcattttgttgacatgcattcctccttttgtcatcttgttggggggaggggattaaccaaaggccaccctgactttgtttttgtggacacacaataaaagccccgtttatttgt

SEQ ID NO: 17124 - DNA, 1485 bp, Homo sapiens
gggcttccaatgtgctgcccccctcttaatactcaccaataaattctacttcctgtccacctatgtctttgtatctacattcttgacggggaaggaacttcctctgggaacctttgggtcattgccctttcacttcagaaacaggttgacaactcagccctgctcatgaggcagcaaaccctgcaaagggctgggactggtggccttatgtcagttgtctactctggagcttgacttggacctccccaggtcctaggcagtaggttgaaaaacactgaagtgcttttcatgaagcacagctgcagcaaagccttgcaatcccaggctggggtcagcctacagttgtgttgcttattacaacacatgcggaccaagaggggcttgtgggctagaggctgaccagcagcgtttatttagcaagggtaggtgtgcatcacattgggcttgttctcacccatctggtttggccattcctccttggtgggaatcatccaggtactgctgaggtcacctgcgatttgccccatttcctatctctagcaacctcctgggccccatgcccccaccccttctagaacctgcattcccagggccttcaccacctgaccaaaggtctaggctaacctttggtcatttgtaacaagacctcggaacagacacgtgtgtggcatggtttggcctggggatcttagatgtctgacctgaactattgtagaacagcgctggcttttgggggagcagcaaaaatgagaggagtgctaggtgggtggcctgagcatctgtatccagggacaggactccaaaggcttttggtcccagagctggggtatgttggccccagcccccagcctgtggctcccaaaaggcctctggttttttgtaatctcagtttacagccatttcttaggtttttaattacctttattttattttgccaaacatacctgggaataccttttattttttttttaccttggggtgatggttccaaaccataaatgtgattatagttaacacatgacccttctagcgtcccagccagtgtttttcctgacctctgttctttggagaggaggatggaagggaggggtccggcacgctgctggcattttgctgtgtcctgcagcccctttccgggacacctgggttcacacagctttttagcttacataactggtgcagattttctgtgtggagatgttgccttgaccagccttggctggactttaccaggcatgcagaagcctgtaccaacacagactacagcacccaggaggtgcgagtgtggctgctcagcggttataacaggcctgactgcattgttcaccggattataatgagccaaaatgtttcccggtgtttgctggtttcagggaaggagtttgatatagcagattaaccaccctccttgtagctattggggcttaatggtttcctggtgattcttaccaatccacaataaacatggcccattggcatatctgc

SEQ ID NO: 17125 - DNA, 718 bp, Homo sapiens
gccttgcttgctgccttctggattcttggcccgcacagagctggggctgagggatggactgatgcttttagctcaaacgtggcttttagacagatttgttcatagaccctctcaagtgccctctccgagctggtaggcattccagctcctccgtgcttcctcagttacacaaaggacctcagctgcttctcccacttggccaagcagggaggaagaagcttaggcagggctctctttccttcttgccttcagatgttctctcccaggggctggcttcaggagggagcatagaaggcaggtgagcaaccagttggctaggggagcagggggcccaccagagctgtggagaggggaccctaagactcctcggcctggctcctacccaccgcccttgccgaaccaggagctgctcactacctcctcagggatggccgttggccacgtcttccttctgcctgagcttccccccgaccacaggccctttcctcaggcaaggtctggcctcaggtgggccgcaggcgggaaaagcagcccttggccagaagtcaagcccagccacgtggagcctagagtgagggcctgaggtctggctgcttgcccccatgctggcgccaacaacttctccatcctttctgcctctcaacatcacttgaatcctagggcctgggttttcatgtttttgaaacagaaccataaagcatatgtgttggcttgttgt

SEQ ID NO: 17126 - DNA, 216 bp, Homo sapiens
gcatccaggaggctgcgcggccccggctcctcagctccctcagtgtgccccgtggtgtcaccgggactccaggcacccgctcccctgcgaccatgccaggcacgctgggaggaggacggcagctgctcgtgtcctgcccctgccacatcagtgactgctttattcttttccaataaagaagtgcacgtgtcagagctggagcgcctgcattgtgag

SEQ ID NO: 17127 - DNA, 956 bp, Homo sapiens
ggtggtggaatcggtgaggagggggcttctcagtcctgtgccgtcctcccatccaggggagtggctggctcaagcctgggtccccgggctgagccctggattgggtatcgtggggcaggtcaccctggccacgatgcccccggcacacccaggcccccttcattagtgccttgctttgggccctgcagggggaggggtgacagggcgagcccccaccccagcagcagcaatacccccaccctcctgccctgtgcccaggtgttgggacagtcccaccctccctgctatttatatccctctgcctatttattgaatcgaacttcgcctctgtctccatctgtaaatatgtgtccccccaccggatgtcgccaccctcactcacctgcctcttcttgagctgtcctgggccctgccacccgtctgggctcctttgtgtagcattatcagcctcggtctggcctctggcacctcacccttgccatggctgaccccacccattccaaggcggggtcacggtaccagcagcacttggggtgaggcctccaaagcttcctcagaattgtggctgtgccacgctggaccacagggtccccctcaagcatctcggggccctattctctctgagcacctggagggctggactcaggcttgtgccagggcctgacttgggcctgggggccctagaacactcctcctcctgagcctactgccaaacgtcctcagtgttgtctgcacctgctccgactccttcagccgccccattcagcgcccgctccgtccagtgcccgccctgtggggccaaggcggccgtgccttactactctgtgtcttctgcctcctctgaggaatctggccctgtctgacagtcccagaccccccgttctctcctctttagttgcatgagtttttctttgttcatggaatgttttttcctgattaaatgttggggaaatgcc

SEQ ID NO: 17128 - DNA, 585 bp, Homo sapiens
ggccggccagtgcaaggccactgcctgccgaggacgtgcccgggaccgtgcagtctgcgctttcctctcccgcctgcctagcccaggatgaagggctgggtggccacaactgggatgccacctggagccccacccaggagctggccgcggcaccttacgcttcagctgttgatccgctggtcccctcttttggggtagatgcggccccgatcaggcctgactcgctgctctttttgttcccttctgtctgctcgaaccacttgcctcgggctaatccctccctcttcctccacccggcactggggaagtcaagaatggggcctggggctctcagggagaactgcttcccctggcagagctgggtggcagctcttcctcccaccggacaccgacccgcccgctgctgtgccctgggagtgctgccctcttaccatgcacacgggtgctctccttttgggctgcatgctattccattttgcagccagaccgatgtgtatttaaccagtcactattgatggacatttgggttgtttcccatctttttgttaccataaataatggcatagtaaaaatccttgtgcatta

SEQ ID NO: 17129 - DNA, 151 bp, Homo sapiens
gcccagcctggcgccccttcctaggtcatgcctcctcccctagggaatggtcccagcacgagtggccagttcattgtgggggcctgattgtttgtcgctggaggaggacggcttacatgtttgtttctgtagaaaataaaactgagctacg

SEQ ID NO: 17130 - DNA, 818 bp, Homo sapiens
tgaaggccacttgaagctggaggagaaactaaagccttattgagaaaacatgttatagatccttttgttgctgagagagtggaacataggtcctagacagggtgaagagttctggcacattttagctgctactttgagacctcggtgatgttacctggtgtggtcatcccatcttgtcctgttttaaggatatgggtggtgaaagatgaaagaggcagagtttatcccaatgacttctctgtttgagttgggaagcctcaccttcagacccagtaactgtccgcagctgtctgctagtggttgtcttaacatcgtagtcctagtttgcattttttaaatcccctctgtttaaaaggtttgtaaaacaaaaacaaaaaactaagtctgctcagtgaaatgctgtagaaccctaaataagtggtagaagagtgtcactgaattttgtctctgaattcagtataactgagttttgtccatgctggtgtctgggttataggcctgatgggcctggtagttttccatcttgttctggcctagaggtcagtcctttgcacttcctcaaagcttgtgtacagtgctcacctaaatccatctgactacttgttcctgtgccctcttgttttaggcctcgtttacttttaaaaaatgaaattgttcattgctgggagaagaatgttgtaatttttacttattaaagtcaacttgttaagttttttatgtattcctgttgggttttcttgttgatctcatgctagcagagcaaaaattgtaaaatattttgattaaaaatctagggacctttatgtcctatttgaaat

SEQ ID NO: 17131 - DNA, 159 bp, Homo sapiens
cttctgacacccggcccctgggacctgacaggtccactcgtccacccacccggccccaaatcccccggcctgaacccccggccttaaacaccctccccccacaacccaggccccaaagtcttgggccttcattaattctgtcaataaaatgtttcaagg

SEQ ID NO: 17132 - DNA, 571 bp, Homo sapiens
atccatcccattcacccagtgacttctttttgcccaggcctggactttttgcatcagtcacgttaaccagatgactttgcctgttaccaaacctcatgcatccacgtttgcgtctggggaggaataaaaagacatcgttcccgcttctgcgttttgttattcctactgccgccataggaattatttcgttggctgaacgttaccagcaccccgagaacacattttgatagaatcagagtagaggacatggctgtcttctaaaaagccacgacatgaaaatgacaatccctttcgtctccttcctccgctgcttccacctaacgcagcctcctgcctccgcctttgtttcatagtgaggattttattttgcacggcgccctccctctaaatacctaccctagatgatttcatcctgcccctcacttcttaacatattcctgtgtctttgtaatggccaaatttctccttccactcgtccgcacggtacgtcttcatgggagtcattttattccttacagcttccttgtaaccacagccctaaatccatgataaagctactcttgtactcctc

SEQ ID NO: 17133 - DNA, 2243 bp, Homo sapiens
ggaagatgacctcatgttcattgttcctggttttttccagccagcagcctctacactccatcataggacatcgagtccctcctcctcttctcccatgccttcttccctgccatggcaaatctgagtggcttctctaagcatctgctggtacaagtcaatgtggcaccatgagcttcatggtggcagaagagacaatagtccttagctctcctcccagtacaccccctacttggccagtctgtaggccaacaagaaggttcctttacccccatgcaagacacttatgagaacacattacaagatggctgaccgtggaggatgagtggatcctgaaaggttgtcccaaactgttgatttggaaaagaaataagcacatagataaccttattgtgtgctgcatggaaaggaactgaatacatttgcctttaagcatgaaagattttggtatcttggtgtctactttcttttttagttggttttacattacagaaagctatttaaatgtgttataattatgccgacaaaattggcagcataattactgtaattgaaaaatctgatattgtccaggaatgctttctaccgtacaggataatgtatctcatggctgtttccaaagggtttatttattgtaaaacaagtgatttaggtgggaaagggaagattttggatttttattttgtagaaaaggttttaagctttgaaatgtgaatgaaatatccttatcaaaacattaggggtggccataactcctctgtgccacttctactatttttttttttaatctagttagtatgaaatacaacatttaaaccggaattttaaagaagtagctttccagggattcagaattaagaaagatagtgataggacatgagaaataaatttccatcaagtgtaatctaccgtctcatgatgaccacaaccctgagaattattctttaaaagcttacacacacacacacacacgggcacacacgcacacacagaatcttaccacattttgctgtagtggcatgttaccatgtctacagtccctactagaatatcagtcagctttcagagggcaagacttctgtcttcaccattatactcacagggcctagcacttaataggtgctgagtatttgaataatgactttatagaaagaaaactcactattaaaggttagttttactcagaattgttaatcttggagatgatctcttgtgaaatatgagtgtgtttctaaggccatacatttaaaaatgtttgcattttaacccgtcttgagaatgatgtattgaatttgaaaatcaaaactaccagtggatgtgtggaactttacagaaaccacctatttgcgtttttctccttacatttaaggaaacataagccattttgcttgcaatatgtatgaatcatctcaaaaccataatggtatgagcctctttgctgcatattttgctataagaacttattttttttcactttttattatggacgctttcaggaatatataaaagtagagaatatagtacaataatccccctgtgtatctatcactcactcacaacaatcatcaaattatagctctgctggtttttaccagttattgtgaaacaaatatcaaaatgtcattttatcatatttcagtatgtatctctaaaaggtaagaattatttctaaaaatcataaatacctcatcatatcagacattaacagtaattacataatatccaaaatctgatcagtgttcaaaatttcctcaagtgttttatatttagtttgtttgaatcaaaattcatgcaaggttcacatcgtatttgcatgatttggataagtctcttaaccttatagatcctcctctatttttttttttttgcttgctatatatttatatctctatatatattgatatagacatatgtagtgacactgagtcatctgtttcctgcttccccacactctgcctctcctgacatctgggtctctgggttatgccatatatggtgatagtggctgcagccactttacctgtgtgacttacccacagcaatgggatggtaacagcaaagctaaccaaagtgctctgtgcccctttgggttgcatgtggggagactggccacccaatgcctctccagtggggtaggggttgtcttttggtgcatctgtttttcctgtgattattggtgagggcagcaaagattagcaggtggttgtaaactaccttgagtaggttgtaataaatagtctggcctc

SEQ ID NO: 17134 - DNA, 1851 bp, Homo sapiens
gaaagatgaaaatatccagtgtaaagttacttaagctaaatcaatttcaaagaagaaaaacttggaggactcattttacctgacttcaagacttactataaagctatagtaatcaagatagatggtattggcagaggaacagacacatacgtcaatggaacagatgagagaacccagaaataaacccatataaatatgctcagctgattttgaaaaagtgaaaaagcaattcaatggaggaagaatagcctttctgacaaattatgctagagcaattagacacccatggcgaggagaaaaaagaacctctacttaaacctcacatcttatataaaatttaactcaaaatgtataacggacttaaatgtgatacataaaactagataactttgaaaaaagccacaggagaaaaatcttcaggatcttgggctaggtgacaagttcttggactttgccccgaaagcacatccataaaagacaaaatctgatatattggacttcttcaaaatttaaaaacttgtgatttaagaagaggaaaagataagctacagattgagatgaatttgcaaaccatatatctgatcaatttggaatatataaagtgtactaaaaactcaactgaagtcaggcatggtagctcatgcttgtaatctcaccactttgggaggccaagatgggaggagtgcttgaggttaggcgttccagaccagcctgggcaacatagtgagactcttgtctctacaaaaagtttttttaaaaaattaactgggcaccatgacacacaccagtagtcccagctactagggaggcaggaggatcacttgagcccaggagtttgaggctgcggtgagctgtgatcacaccaccacactccaacctgtgtaacagagtgaggcctcatctcaaaaaaaaaaaaaggccacaaaactcaacaataaaaacaaacagtccaattagaaaatgggcaaaagacatgaatagatgtttcactgaagaggatctatagatggcaagtaagcatatgaaaagctgttaaactccataagtcatcagggaatgcaaattgaaaccacagcgaggctatgacttacttatctcaatggctaaagaaaaaatagtgaaaataccaaatactgatgaggatacaaactggatattttatacattgctgacaggaatgtaaaatggtacagccactctgggaaagagtttatgaatttcttatcaagttaaacataattttttaatcaagttaaacataagacccagcagttgtgctcctggacattcattccagagaaatgaaaacctatattgtacttgtactcaaatattcataggagctttatttgtaatagccccaaactggaaacaacccagatgtcctacaacaggtacatggttaaacaaaccatccataacttggaatactgctctggaatgaaaaggaactaactgttgatacaagaacttggttgtacctcaggggtattatggtgaacaaaaaaaaaaccagtctcaaatggtcacatactgtatgatcgcatttatataacattcttgaggtgacaaaattattgaaatgaagaacagattaatggttgccagggatagggactggagggggtgtggggtatgtatgactataaagggatgacgcaaggagttcctttgtgctgatggaacagttctatatgattatgatgattacgatgttgattataacatttgattatgaggttaagcacatgagtctttacctgtgctgaagttgtatggacctacatacacacaaatgaatgcatgtaaaatctggtgatactgaataaagtctgtggtctagatagcagt

SEQ ID NO: 17135 - DNA, 973 bp, Homo sapiens
tgctggcaattaaaaatgtggtttagttttccaaacatgttatcttaaatacccctttatccttacaggttgacataactttgaatgttttaacagcaagaattttaagaaaagataaacaccattttatttatttataaaaacaaaattagtttcaaatatttttgacattgtgatttttttttccacatttctcagcaaagctaatggtattttaatcattatttttgcctgtcataagaaaactcttagctgaaatggccgaaaactgtgagacatgctatggaagctgaatgccggacgctagcacagtttactttttccctttctaatcggctgatgttactctcacttgatgtggttaaaccattttagaggtagagaagacagacagtttgaatatttgtaaacttgtttttctttggtatatttaggacttagtggtcctctgttgctattgtcttctataagtggagtttcatgacttactgcttaacgaataactaactactatgatattctggacattttaggaaatggtaatttgccttgctacacattaagagggctattaagactacattttttctaacctcagataagtgcagtgtctttgcaatgccaacataagggagatcttggccaacgtgaaataaaattactcattcaaaactctgcctaaggtgattttgtagttcttaacagttctccagagcatcttgaacaggaatattaagataaatgtgaatctgcaatggctgaaaagagttgtgagcttttttattcatgataaaaccttataggaatagtataaaaaatccctgtggaaagctactagtacattgaccagcgctgggtgatacagattctgataaaaacataaatgtattagttcatctccatgtagtaaaaagtatacttatacaatgttttgtacttgtatttcatgaaattaaaacagtgatgctaaaac

SEQ ID NO: 17136 - DNA, 159 bp, Homo sapiens; identical to SEQ ID NO: 17131

SEQ ID NO: 17137 - DNA, 571 bp, Homo sapiens
atccatcccattcacccagtgacttctttttgcccaggccgggactttttgcatcagtcacgttaaccagatgactttgcctgttaccaaacctcatgcatccacgtttgcgtctggggaggaataaaaagacatcgttcccgcttctgcgttttgttattcctactgccgccataggaattatttcgttggctgaacgttaccagcaccccgagaacacattttgatagaatcagagtagaggacatggctgtcttctaaaaagccacgacatgaaaatgacaatccctttcgtctccttcctccgctgcttccacccaacgcagcctcctgcctccgcctttgtttcatagtgaggattttattttgcacggcgccctccctctaaatacctaccctagatgatttcatcctgcccctcacttcttaacatattcctgtgtctttgtaatggccaaatttctccttccactcgtccgcacggtacgtcttcatgggagtcattttattccttacagcttccttgtaaccacagccctaaatccatgataaagctactcttgtactcctc

SEQ ID NO: 17138 - DNA, 7717 bp, Homo sapiens
ccttccaacaaggtggatccagagcttttctccttcgagtccccaacagcaaagcataggcctcatctttggagagggggaggagtgataaactagccaaagttagggcctctcttttgttcctgcagtgtcaggggaatgaccaagtacatcctggtgcaggatgccttgttctttctcacagtatctatcccactcctcttcagtctttacaccctgccagctcagcctttatggttgtcatggcaaattcaggtgatatatgggtatgaggtttgaacactgaggactgacagggccagcaacgtggaggtttaggggctccccaatgtaatacctctcgatgcaggctctgatcgtcactctgttttctgctgtgcctttggaagctttcttctaagatggttttcacaggtacatgtggaacagcgttcaaccttccagggaatacgaccccttctccctgttactgcccttctcttctttattcctctctcctctttcattattctgttctgtattcctttccccttcattctcaccctgtctgcttttactttttctctttcttcctccctttctccttctcccctccttctttttcagactgatcctttctctgcctgtatttctatctcatttgatctatatttgtctctctctacctgtccctttttctctaacatgtccaaaagtgctgtttttccatagatgtttccttagatgccaaactttgctatgctatactatttactaatttttattaagggaaatggattactgtaatgaactgatcactagcaatagtgtgtatcccgatgtgtgtgtgtgctcacaaccactctcacctgttcgtgagcgcatgaggcgaagttatcttatatttccaggtttaactagttggagtttttctccctttctcaataatcaacttatagtgctgacagattccactagcatgctgagtaggatagtaaatcaggatgctcataactttgtatgtctgacccaagtgccaaaggcagacgtgctttatagctaaatgaacaaagcaaaggatacagaggtatgttctctcttagaagctaacttccctgagactgcatggctcaggcgttaataatggacataaaaagtcataaaacgttagagctggaaggaatcttaactattaatctagttcaatgcccttattttacagatgggaaaactgaggcctggaggtaggaagggacttgcccccaaggccgcacactgagttaacagcagaattgagactggaatataggccttctgactcctagttcagtattcttacccctgtaccacattgagtcatgggactttttcctagggctctattaacagtgacagaaagccattcccattcaattacttttcaggaaccatgcctagttagtgtggtggtctttctccagtgcatggtgggtagctaattaactatcaggtgttgaggctgcccccagtggacatcacctttggctctgtcaccttgtagaagctcaagtgtggaaaagaaaagcttaaagaagccctaaccaagctgtatcttcgccattgcatctactctttgctgcacacactgtgcttgctcctggctttgtctgcaatggcagctgcctgagaacctaaatttcagcaacagtgaaaaactgagatgaaagatgtataatgtagagaactgacttctctcttaaaaagtacagagagcctgtgctgtgaacccccttcaatgggaaaaagctgcagtggtgatggcaggctcctaaagactgctgctaaaagacacaagaattatacagtttccctctataagtgaatccaaaattcactgacgaattcagagattgagggcacttgcttgaaatcaaggtgctccaacttagtttaagacctccagactctaactttatagatcatctcttctagagtgtgcatggatgtgtgttgcagggtggagaagtggggagaagtgtatagtagtacacggggggaagaggggacctccatgtccctttgttggatacatattacagaaatatgtgccactcactttttgttggttctgaatcttcctgaagtgtactgacatttgggctgcacagagccccacaccttcacttacacctcctcttctagaattgctttgctctatttttgtatatataaatatgttatgatgattattaataatgttaatgatattgctgcaaatggtgccatatataaggttaggcttcttggaacatttataaacccaaaccaatacctgtaacctcttatgttgctttcagatccttcaattttaagtaactttttaatcttacaagtctgcttgattgtactttacacttatctaccctgaaaagctctgcccagttctctgggtcaagctggatggtgatgagtagcaacacacacttctctgcttctgcctgaaatgtgcttagagctcagttatctaaggattctctgacactagtgcattgttcctggagctaaattattctatggatgtttgcttattagtttcaggccccaaaataacacgagcccctccaccttgatagctccttgatatcccaatcttgcagtcctaactcaggcaaattgtgcactgccagaggggccctgggttctgccatatacccagaggagcctttctcagtgtgtttctaaatggccttacacttggtagaagaaattgaagggttactcaaatacagttgcaatctgcaatctgctgttgagtcagggctttcacttgtgtccaagttggcctgatatggactgcatctgctttacgtatagatgggtcctgttgggatatgcgcatggacgtgtgagtgagtgtgcgtatgtatcccttctgtgattatatatattcacacatctctatatattttaatgtattgcacatgtatatttaaaatatatacgaaagaactctaaatcctgcagggaggctctgttttcattatttttctactttgtgtcatgtcctgtataaacaggaatatttagagggtgtttcctgcttagcatttttttgcagttaaatcatctgttagcccctaactctactgccttccacatattggttccttgatacatttcatatgatatcagccaagagttttcctgtggttccagcccatcttccctaatcacaatagcaataataaatatagtgaatacttacatagtgcttactatatgctaagcactatttttagcatgttatttatattagctcattcattcctcacaattctacaacataggtatcattccaacctctattttacagatgagaaaactgaagcacagagaagttaagtgacttgccaaaaggtaacaattgtaaatggtagagctaagatttgaacccagggtgtctgactcccaggtccatgctccagagtcagatatagaaggctggagcacagtgtaaaccattctggagtaacaagcctcaaatggtgaataattctttccctaactctggtccacctgcaacctaggagttaaaataagtatcttgctatgttaagagtaaagcaatagttacaggcatcatatattagctgtcttgctcccaaaatggtgacattacaaacttttccactattccctttgaaaacatgcttgcagccagttaccatttcttagcttatgatgtagagctattaagggagtattttcacttgtgccaaagagggtaagcgtttattagccttatctttattggccagggaaaactaattcaatttttttttgaacaaagtataactgagactatttttggagcttaagatttgttagagctgttaacattcaaccttattgattatattgagagcgctcttctgattcaaatgtaagcaaaccactgatgaccactggtccgtataacacattttaccaacagctccttcacactgaatcctttaacttggccaaaggacccttaaagaacatctagtccaatgtcaacattttatagctggagaaagggatgcacagagagggaaaataacctgtccaaagtcacacagttctgaaaattgagtggaattatgactttataccagagttcctaatttccaggtatcttagcctcagtttcttaaaaaatagagtttgaagcaaaagctatgtgcgatccagggtagtatgagtaaggaaagggttaatgagggagggaagaaagaagaacaaataaaaagcatgtcactgagttggccacggtctgttccttggcaagctaatttcgcaattttttgtgacagaccatataaaactactacatctccatacagcccacgtggtggaggaaaggaggtgaattcatctgctagctctcatctcattagtcaaattcttccccatgtgatatttacccttctacatttttgggtagtgcgtgatgggcacttaaatatgtaccttggcatttcatgcttcagcaataatgggaaggattgtggctccactataaacagtaaggcaagtatatgaatatagggagattaaatttaaagtgctacactagggtggtgcttttaccttatgtctttaatcacattccttcgaagtaagttagagataacctaccacctttaaagtaaataaagctttattgtggctcttagaactgtactatgtttgccttcctgagcctatttattctctagcttgctttaaagggcttcttttttatatggaaattaattccctgttcaattaaaggagtaacaaactctcaaaatatctttcttcttaatataaaaaggaatttcacattattgaactcctcaaaaagcatgtgtaagtcaaaatatgtatgtgaaggcacatatgttcttttaggttccatgagcataatagcaggaaaactggttaagtcaataaatgctggggaaaaaatggctaaacaaggtattctgtaacatgaaaataaagcaatgagttggttggctggctttttaaaaaatatttcagccactaattatgacacagacacattataagaattatgctaccttttattcacatatacaatagttccctgtgtcctatagatcattgtcacataaagcaaaagcattagtgccccatttggacctttggccgaaggtttgataagattttgtaggactgaaattcttggtccctttatcctagtttaggcccatatccttattttcactctcaaagataagatcatgacactaccagtgttgctgctgttaaaggccaggatggacaagataaggaaaggcattttgggaatgacactgactaatgttaggaatcttgctgtcattacaatccaagttatatatgtttgctcccatatgtatttgttggccaatctcctgaaaaagaagaaggtaattctaacccacacattgtcattcccaaactaacctggcaatccttttgaccataccaggtaatagtcatccctctgatggtaaaagacagagatgtcaaggctctggaagctcccaggtccttgaagaactaactaaactgctgaacacagaagtggtaatgtaggcaagccacaggtatgttctcttgtaacaagatggggttgaccatatgtgaaccctgaagagtcattttgaacctgtgtcctaaggcctagagtactttaatcctcatcttcaaagtcttaccactctgataacaaaaagaaacactacaaagaaactgcaaggaaagggacagtcattttttttaatatctaccaattatttagttattcatatatgcatttctttatatagaaaagtatttatatgaagtttccaaaagactctgatattcagctttatagtcttggatagaaaatcatgtgtccttggatggggattcgcacaccaaggcttaacagaattagtttggggaatactcatttttactctagagattagttggcttaaacaactttactcgtgaatttttttcttaatggaggtgaagacctcccaaagaggagaaggccccaggcctttcttaatatataaaccatattgaaagaaagaaagaaaaaagtaatgggaagtaatagtaaatgtggatccagaaagaaaaacaaaggttaagaaaatgatgtatgtgaaagaaaaaaagctctataatcagtgtgtttctctcacctaaaacaccatttactaactacttggttcagttgtaccctttaactctattttgtccttgacttatatcaacactcttcttttccaaactcctatagctctccatctggaatgattctatggggtggggggtcgggggaggagaaagggagacagcagaagaaagaaagagagagaaagatagagagagagagagagatgggtggagacttggcctctctcctagaggttcaaagttagaatatgccactaacactatctgcctttcaaactcccttctaggacatgctccatagtacttagatcttatatcaaatgacaaggtttctctccttcagagagaaataccagactggatttgtggtttccctggattggttttttctgagtcaaagtggtgttgtagaaatcacagtaccctgagaccaattaagtcagaatctttggaggtgttgaggaatggatttttaaagttcccagatgattataatatgcaaacagatttgagaaaattgaatcactttattccataaatgcagatagtgaggctaagagagggaaagtgacttactcataaccacaccgtgagttagtgaccaagtcaggataagaatccaggtctgctgactcctaggccagaattcttgtctttatactacactgcttctatctctaccctattccccctctgagcctttgcttttctcatctgtaaaatgacgataataaagcctagagagtgtatgagaatcattaaagcagaagcatttttcttaatgtacaaggttctatacaaatgcaagggaattaatgtataacatatatgtggggctaagtctctaaaacaacataataaaagttgtttttattttagtcaatcttttaggtattgtgtctacctgatagcatgtaacaagattgaacacttgtgtaggtcgtatgtgcctttaatctgaggttggcctcagtgacaatcaaaattagcagttgaggaaaaaggtcatacatttttctcttgcccttgctggaatagggatcaagaggaatataaaagcagtgggatatctggatttcttatactcagtcaaccacaacatggccttagtactgaactagcccagggtttcaatggaactcgtagatctcattcccaaggctggtcctggttgaagggagaaggtcaaaaaaggacgtgtcttctgaaaggcattacccatggaaagccaagggggagggttgcccactaggaggagcttcttttgtagaagccagaatggaggaaaggggctttctgacttggagcatctgaggaaatagattatttgaggatctagtactcccagaataatctgtaaccacaagaaacacatttcttgaactccagcgccccagaacaggatatccatatccaatcccatcgtatccatcctggatgttatgaatttccagagagggccacttctacccccctaggagtcatacatctggctacttatttgttaaaaataaaattctgtaccatttat

SEQ ID NO: 17139 - DNA, 1805 bp, Homo sapiens
gaaagaagaagttaccattaaccaaggatatgagagaacaaggagttaaaagcaatccatgtgactcaagcctttcacatactgacagatggtatctgccagtctcttcaaccctcttctcactttttaaaatcttgttccatgcctccaggtttatctttgtcttatctaccagtttattcctgtgaacttcagattgaaccattcattgcagcagtagccttaaaaaggcttttgtttatttctttggtttgttaactagtgtcatctatttagagaaacatttttgtttttaattgctcaaagctgtcgccgctagtcttatgagctatctactaaaactatggagaaactttgtatgtgcacacaaaagtattcaagagacagtattgctaacatctcatcttaatgtcttttgttattgagaagttttaggtgcttcaaaacaatataaatggataatagttgttatttggggaattgtaatgatgttggtgctgcttccttctaagagctcagacaagtaaagtatgaaacattcttatttcagttagatggggaacattttgctagcccattagaagcacacagaattatccttgtcctcctaatattgactttcaggaataaagttcagtgtgctgatcattcacaatacagtggatagcttgatatcttctgttttcccattgcagttgatttgagaagatgaaggtttaaatattgttgaaagttgcagttttttaaatgtgttcctttttcttctgtgaatatttagggcaatcgtgtcgctaatagaatatgtagtagagggggtggggaggtaaattcctctgacttgccaaagaaaaagaagggaaccacagtggatatgctagcattttagctgtgcaaagggaggtagtgtgggaaaagtgtttccattctgggaaaagcccaaaccgaatacggtcagcagtcaactccagggtttgggcttgattcctgttgaataatagttttgagcattctttgtggttaaataaattcttaaatctgcctagttttgatgaattcttttgtgaaacttgaaagagaatagacagtatgacatatagaattaatacaaaacagtttaacaaccatttaactgcagtgtaagaaaattggactgtaatcatatcgctactggcatctgttatctagtatgcatttctggtgtgtatctgaaaggaagacattttctaccctagatccaattgcatttatttatcaataagtgccattaaattgaaattatattacattttacactttctcaatgaatgaacaaattagtctgtagaatctagccacctgtttagcctagtcatgtgccttgaacatatatgtgtcccataatctggctcatggtacctgttcttctatccaaacctttcaattcatgctacctgattcatttatttgacatagatcttaggcccacttgaactcttttcttgtttatctagcatagcacaaacgtttttccagtcttctttatcaacactaatgcctcttaattgcatcagtatttcctattggaaaatacatctgttccagaaaaacatttggcattcctgaataatttccaaatgtttttaatccaaagaaaaaggtttaaagcttatttccctttcttatacacacctgaataaaattgatgtgcatgttttagggatcaattacctaactgttccttggtctatttatgtataagaatgctttttaaagcacatgtctcattttaaatgacgcacaaactgaagatgttaataaaatttaag

SEQ ID NO: 17140 - DNA, 315 bp, Homo sapiens
acggacgcccacagaggcctgcggggtgggggcatcgctgcctggggagctgaggcgttaccgctgtgttgggggcagcttggtgtcaggtgcagcagggtcctccttgtctggttctgcacccgtctcgctcccagccatttgctgggatgaccgtgcaggccggtgacacggccgcacctgccccaaagcgggccgcccgagcgtccactccaagcctgagcatccacacaattccagtgggccctcggtgcctgctgtgaactgctttccctcggaatgtttccgtaacaggacattaaacctttgatttta

SEQ ID NO: 17141 - DNA, 130 bp, Homo sapiens
cgccgcccgcgagaacgccgccgcggggccgctccccacgtgccaccaccgggccaccgcggctcgtgtaaaaactgttgtggaaaatgagtgcgtttgtacggaatgataaacttttatttattcacag

SEQ ID NO: 17142 - DNA, 533 bp, Homo sapiens
atcatctgggaggaattcaccccagaggaagggaaaggctaccgcgaagaggtcttgaccgtgaaggaaattacctgagacccagagggtgtaggaatggcatggacatctccgcctccgcgacacgggggaactgttttcttgatgatgctgtgaacctttatatcattttctatgtttttatttaaaaacatgacatttggggccaggcgcggtggctcacgcctgtaatcccagcactttgggaggccaaggcaggcggatcacctgaggtcaggagttcaagaccagcctgcccaacatggtgaaaccccatctggactaaaaatgcagaaatttacccaggcacggcggcggacgcccatcatcccagctacttgggaggctgaggcaggagaattgcttgaacccgtgaggcggaggttgtagtgagccaagatcgcaccattgcacaccaacctgcgtgacagagcaagattgcatctcaaaacaaacaataataataaataataaaaacctgatatttggctggg

SEQ ID NO: 17143 - DNA, 450 bp, Homo sapiens
gggccgcggcctcctccacacacacacacacaccaggggaaccaagagaaccacgtagaatcctcaaccgtgcggaccatcaaccttcgagaaattccagttgtctttttcccagccgcatcctgcctgtagatggccggggaaggctctagaaaaggggcgcattgcgatccaaccatcggcagccgattccgtgtcttgatcacggggtgggagggaaccgtggcgtccctgcgtggggcccatgggtgagacactccagtactgagacctagagtccagatgcttgtaggagccaagtcgtgttctaagtatttatttaaaacaaaagaatcacgttttcccatttgtacttcagcgctagcccctgttttgcacagccgagtactggcgagtatgttctatgttgggcctcctgctgcaaaacaataaacagaggacgcagaggtc

SEQ ID NO: 17144 - DNA, 130 bp, Homo sapiens
agcccaggcagcatgttcattatagggatgtcctcccccaggctgcaggtggaccgcccggtccccaagtaccataggacagtcacataggagcgtgtagtcgtgactgaataaagaaagcaaaagcctg

SEQ ID NO: 17145 - DNA, 2904 bp, Homo sapiens
gtcccgggggcgcagcttggagagccgggggcgcagcttggagatccaggggcgcatggagaggccacggtgccagaggttcagggagaacagctgcgttgctcccaggcactgcagaggcccggtggggaagggtctccaggctttattcctcccaggcactgcagaggcaccggtgaggaagggtctccaggcttcactcagggtagagaaacaagcaaagcccagcagcgcacagggtgcttgttatcctgcagagggtgcctctgcctctctgtgtcaggggacagcttgtgtcaccacgcccggctaatttttgtattttttttagtagagctgggctgtcacccccgagctccttagacactcctcacacctgtccatacccgagggtggatattcaaccagccccaccgcctacccgactcggtttctggatatcctccgtgggcgaactgcgagccccattcccagctcttctccctgctgacatcgtcccttagttgtggttctggccttctccattctcctccaggggttctggtctccgtagcccggtgcacgccgaaatttctgtttatttcactcaggggcactgtggttgctgtggttggaattcttctttcagaggagcgcctggggctcctgcaagtcagctactctccgtgcccacttccccccacacacacaccccaccctgttgctgaccaaggtgatttttggcacatttgttctggcctggcttggtgggaccccacccctattctgcttctgtgagtccctgatagagaaggaggtcccatcaggcccctggaacacactcaggcttccctgactcaggacaaggaccacgggaggcccaggtgcggaaaggaggctccgtgagatggggtccagcccatcccaacacaagggtgcagcttgattcgggagttccccacctcctgcccattctccgcgtccttttaccccatggagagcctcagccatggcaagtccatctggagtccaggaagcaggcaactggcctgacccatgagaccgtttggagaccaagcagcagatgcaggtgtggaccccaggaacctacaggggtgtcagccgctgagccccctccctgctgtgtgggtggtgagcaggctgggtctttgtctgtcttcttctacacggcatgtgcctgcaccagccccaacacctgagctggtttagcgcaaagaagagctctgactctccaggggtgctgggacatcacgtggaattggatcccaggctctcttgggcgagaaagaccattctggaggtgggagtgggagagctgcctgtctgcccacgggctctgcgtctccgcagtgggtggccttggatgcccggcccctccctttctgtgcactggggacgctgatggaggctgaagctgctgttcggaggccctctattggtgcctctctcctgccgtcatcactatggcaggaaaacagagatggtttagtaatgaattatcattcccaaacccgtgtccacctggaacatcaggatgggaccatgtttgaaaatcgggtctttccaaatgtaattaagtaaggcgaggccatactgcatttacaatgggcccaatccagtgtccctatgagagacggaagaggagacacagacacaaagcaggaggccacataaagacagaggcagagactgaagtgatgctgccccaagcccagggatgcctggagtccccaggagctgggagaggcaggaaggaccctcccctagagtctctggagggaactggatacaattgcagagtgcactaaacagttgccccagaaagacatgtcttgttttaaagcccagaacctgaaattattatagattttattcggtaataaggaactttgcatgtgtaattacttaaggatatgaagatgagattgtgctggattattaagcaccctaaatgccatgacaggtgtccttccaagagacagaagaggagacacagacacagagcaggaggacacgtggagacagaggcagactggagtgatgcggccacaagcccagggacacctggagcccccaggagctgggagaggcaggaaggatcctcccctagagcctccagggggaactggaggatgcgtaagagacccagaacttccacagaaggaggaaaattaacctcctgcttctctagactgttccaaagctgaaccctagaaagcaaagctgatacagaagcatccaggctgcaggagtacaggtcgcaagtgctgagcgtgggccttgggtgtgtctcatgggggaaaaaaaactgtgaaaaacctcagagtagcatcttcacagtaacgcacggacgatccctaaactgccttgtaaacaaaaatgagagcttgagtcagaggaagccgagacaatatccttcctcgacaacgtgcgagaaccctgacgtcccccagcaaaggaagacgttgcaagcaggcaaaatgcgtcgattttttttttttgtcagtatgatgatttttgcagccacttggctatggagagcagccgacaccccctcttacagccgtggatgtttcctggaagctgactcagtctgttcactggttgagctttgagtgaaaagataacacaggtctattgactcacacacatgttttaagatggaaaactttacttctgttcttggcaggacatggagagagggagggattccaaaaagtctcagcctccatcaaggcgtggcagctcatgccggtaatctcagcactttgggaggctcaggcgggaggactgattgagtccgggtgttcaagggccaacctaggcaacacagtgagaactcatctctgtaaaaaataaaaataaaacattaaaaaaaaacatgagctttgaagtgcacagggc

SEQ ID NO: 17146 - DNA, 2221 bp, Homo sapiens
cgaggaagcgtgttgtcttacaagtcatccccgcagcagcccattggatgctttgctgtaaatacttacccggtcagcttggttttgaacctcagagaccatccactgtctttgacacctagaaggtggaaaaaggaaagagatttgagaagtgagagagggtcgggggcggtggctcctgtctataatcgcagcactttgggaggccgaggtgggcagatcagctgaggtcaggagatcgagaccagcctggccaacatggcgaaaccccgtctctactaaaaatacaaaaattagccaggactgatggcatgtgcctgtaatcccagcttctggaggctgaggccagagaatcgcttgaacctgggaggtggaggttgcagtaagctgagatcgctgcactccagcctgggcgacaagagcgagactctctcaaaaagaaaaaagaagacacaagagaggtggctttgagtgggtttcctttcctcccctattcccggggcccggacgacttctgcttgggaactgccaacgcttctgcttgggaattgcgtgcagcagagcctagaggagctgttccttccttcacagatacttaagacctccaccatgtctgattcgagttctccctgggagggtttagaagaaacgcaggaacattctgggtggcgtcgaaggagcctttcccgatcatcatgtgtgacttctgcgaggtccagatcactgaattcatgtttacattctcgtgcaagcagggacctcttgcttctgagaaatggggaagagaccttttagccaaaatgcccttcttaaaaagagagacctttttttttaatgttcggttaaaaatgtgacagatgagtacaaaaatgcagacacttaacaaaaagcaaacagaaaaaaaagtgtggaatgtgttgtattttcgacaggttgctgccagagagcctgcttcctgctgcctgccgaaatttcactttgcggagttggtccttaaaactgggcggtggccgggcgtggtggctcacgctgaggtcaggagttcgagaccagcctggccaaccaacatggtgaaacctcgtgtctactaaaaatacaagaaactagccagatgcggtggcacccgcctgtaatcccagctactcgggaggctgaggcggaagattcgcttgagcccaggaggtggaggttgcagtgagccaagactacgccactgcactccagcctggaggccagagtgagactccgtctcaaaacaaaacaaaagtgggtggctcacgggtccggaggttatgtcttcggtgtctcagccctaaaagtccagttcccccgtgcggccagcttttccacataaggtgtttttgatttgattaccggaaaggactcttgattcttctcttttaaactgaataccataggggaaatgaattttaaaatattgcccccggaggggttttccgtggctggattcctgcgagttgctttcagtcattcagggaaacagaaagacgttttccaacatgtagaactgctttttaactggaggaaaaatacttcaggaggcttagcatattgcttggattctacgtgcagcgggttctctgcctccgtgaagacaagctgggctggggagaacggtgtctaggagggatgaccccactcagctccaggcagtgttctgccgagaccccaagaactcggggtgtcagagggcaaaggaactacctgcctttcacggctgctgacttctcagggctgcaagcagcacagaatgttatccttacgtcctgagccggtttaagtctgtggaaaaggaagcacgggagaaatccacgtaacctttgctttctttttaagggaagcggttccgccgtgaacttggaaccctcagctccgggtgttctcggcagaagggcagctggaagggacacagtggggcaggctttggggttgctccctgttctgccccgaggccggggacgcagggcagcccacgcctccgtgggctccattctgtagcattgccagcgttctcttcacgtctctaacaatccttcgcttttcctcactcacgtggaaatgtgaactgtcccggctctgtcttcatttttatttttaagccatcgttcccctcctgaacggttgccccttatttaatgctgtaaagttggactgttgttcaataaaccagagcaatgcattagctcctcattcatttgtc

SEQ ID NO: 17147 - DNA, 3300 bp, Homo sapiens
atgccaggactgtgagagaggatccaggagagcctgactgcgttgcaaacaaaattctccaagcttggttctatcttcagcttccctttttgcaaggaacatgccctggactgagagtgggtccccactttctttctttctttctttcttttttgagacagagtgtcgctctgtccctcaggctggaatgcaatggcacgatctctgctcactgcaacctccgcctcccgggttcaagcgattttcctgcctcagcctcctgagtacccaggattacaggcaccaggcacctgccaccatgcctagctaatttttgtagttttagtagagacagggtttcaccatgttgcccaggctggtctcgcactcctgacctcaagtcatccacctgcctcagcctcccaaagtgctgggattacaggcacgagccactgcgcccatgtagggtttccctttcctgatttgtgaaataagactgtcccagtaggcacccactgatgcctcctcttcctcttctaaatctcagggttcgtcattgtgccaatgcccgatgttttcacccctccgtcttaaagcattgttgcaatttcatcacctagatgacataacagccttacaaaaggacagggaggagtgtctgttcctactctcacatagcggaggaaagttagagcctctcagtctctgtttatgaggactcattaatctcaaataattgatgcatttttcatacattagggtctctgtccatgtgtcttcctgatattgttatagaaatggcttcaggctgctggtaacagatgctgcggaaaaagaatgccttaaacaaagccaggcacggtgactcacacctgtaatcccagcactttgggaggctaaggtgggaggatcacttgagcctaggagttagacacctacccagcctgagcaacacagtgagacctcatctctacaaaaaacaaataattagctagatgtcgtggcgcacagctgtagtctcagctacttaggaggctgaggcgggaggattatttgagcctgggaggtcaaaactgcaatgagctaagattgcactactgcactccgggctgggagacagagtaagaccctgccttaaaaaaaaaaaaaaaaaaatgccttaaagaaaataataagagaagggtgtgttctcttccaagtaatgagccgatcaaggggaagcaacccaaggctagcaggctcttttcaattcccagctctgccactcttagcatggcagagagttggcctcattatgccagtatggctgccacagtgtcagacatcacattccaggcagtggaaaggagaaagaaccaaagggcatccctttctcttgaagcagtccctgtgaggggggattatctggaagccccaacccaatttctgcttccaaccattatccatagaaacaactggaagttgagaagtgcagtcttttaggtgggcacctggctgccctgtatgaaaccagaattaggttggtcagcaggaaaacaagaaaacacttactgtgttgactgaggtttttgacgcatcgctttattgtcaaattaaacaactctatctcattctgcactgaaacacgtactaccattgcctataattggaaaatgatcctcagaggcacagaagatgccctgatggaaagtttgccccttgggcaaagagacagccatgggaaccttcagacatagagagagaaggtggcttttctccctacattcctcaaatagctaagatttggccagtgtgttttctaagtcaattctagtgtgtttcatcctcacctcttccctctgtggctttgatgatggaagtgtagtcctaacctactgcacagctgggaccccctgcccctagatcccaatactggggatgggaggaccttgcactattcccctcagtccatctatcgaggtctttgcaggaagcatactgggaattgaaacgagagcctaaatgacatctaagaaaggcagtgttcaataccaggtattaggtgaggatgggattctaaggacatcagtgggaggcagggagccaccttcagacctcagcatggaagcttccaagatccagaggaagaggcaacagcactgagagtcataggtagaagaatcatcacagccctgctaaccaggcagctgatgcccctctcccctggctccctgtgtccaaatcctacaggggcatctgttggctgaactcaacctgaagccaaagagaagatgagtggagagaggcaacatttatagagctcaggtttctagggctggagagggatctggagggacacacaggagacacctggcataaccaaaaaatgattaaaaaaaaaaaaaaaaagaaacatctatggagcatgggacacggggagtggaggcagctaaaagccatctcatctttcaccgtattcaacaagcccattataacaagtctttcacgctcaaccattcaaacaatcccaacaatcccagcctaagaatttcctggcatttgatgaaaatggctgtgggttttgctatctttaagctccctgggaagcaggatataagcccagggctggcaggctctttctagctacctgctcttgcacatagagtttgcctcatggttgcaagaaggctgccatagctccagatggcacatagacattccaggcagcaggaaaaaggaaggagcacttaaccgaaggaggtcagggagttggttagtctccacctgaagaagagagccatgaaccagcttcagttgactaacgggctcctgtgagtgcatctttggacttttctggaggttgaaatctagatgtggtatgtgtcttaaagcagccaccaactcctcccattaccttccaagtgagcccaactacacgatggagcctcttccctgcccttggatctgggctgagcctctgacttgcgttgaccaacagaatgcagtgaaagtgatgccgatactaccctccctgccctagacttgggatacctggcagctatattcttccattcctcaggacttgcaaaaacgggtctcagcatgccttcccagagccatgaggtgtttctttgcccattcattgatctgagaagtgagtgtaaggagtttaaatcaacctctgttctgtgctagttaaggtaataaagttgctgcagtccagggggtaggtacctgtggacggctctgcgaataggacagttgcatttcttgggaatcaagtgcatccctaggctggcagtgcagcagaaatactgaataaaatgtgacaaatctccctgg

SEQ ID NO: 17148 - DNA, 1011 bp, Homo sapiens
acattaaaattcttgcagaatctgaatgtgtctcctgagacaagcatcgtgatagagttcacagtcttaaaagtctgcattttcaggtggggcaaggtggctcatgcctttaatcccagcattttgggaggctaaggcagggagatggcttgagaccaggagttcaagaccagcctgggcaacatagtgagacgccccccccccccatctctacaaaaaatttaaaaaattagccatggtggtgtgcacctgtggtcccagctactccagaggctgaggtgggaagatcatttgagcccaggaggctgaggctgcaatgagctataattattgcaccactgaactccagcctgggccacatagcaagaccctgtctccaaaaaaaaaaagaaataaaagacgaagaatagggagaaaaacttctctcatatcatttatttggtccttcagtatttctgattacttagtctaattttgcacaaaatcaactgtattagtccattcttgcaaagaaatacctgagactgggtaatttataaagaaaagaggttggattggctcacggttctgcaggctgcacaggaagcatggcagcatctgcttctggggagacctcggggagcttttgctcatggtggaaggcgaagggggagcaggcgtcttgtggcaggagaaggaccaagagaggagaggaagagccgcacacttttaaacaaccagatctcgtgagaagctactccctccgcagcaccaagcgggggatggtgctcaaccattcatgagaactctgtccccatcattcagtcacctccccccaggccccaccgccgattctgaggatgacaattccacatgagatttgggcggggacacacatccaaactatattgtcaaccttctacacagccaatgacttaacagcctcattagaagttacagaaactaaagcaataaagttcggacaatgcagagaggtcaccttccttctatggccttgaagaaaccctggag

SEQ ID NO: 17149 - DNA, 21 bp, Homo sapiens
atgtctgcagtgaaaagctgg

SEQ ID NO: 17150 - DNA, 1148 bp, Homo sapiens
aatgtggattccagaatgattgcttaggaactgacaacaaagcggggtttgtaagggaagccaggttggggaataggagctcttaaataatgtgtcacagtgcatggtggcctctggtgggtttcaagttgaggttgatcttgatctacaattgttgggaaaaggaagcaatgcagacacgagaaggagggctcagccttgctgagacactttcttttgtgtttacatcatgccaggggcttcattcagggtgtctgtgctctgactgcaatttttctttttttgcaaatgccactcgactgccttcataagcgtccataggatatctgaggaacattcatcaaaaataagccatagacatgaacaacacctcactaccccattgaagacgcatcacctagttaacctgctgcagtttttacatgatagactttgttccagattgacaagtcatctttcagttatttcctctgtcacttcaaaactccagcttgcccaataaggatttagaaccagagtgactgatatatatatatattttaattcagagttacatacatacagctaccattttatatgaaaaaagaaaaacatttcttcctggaactcactttttatataatgttttatatatatattttttcctttcaaatcagacgatgagactagaaggagaaatactttctgtcttattaaaattaataaattattggtctttacaagacttggatacattacagcagacatggaaatataattttaaaaaatttctctccaacctccttcaaattcagtcaccactgttatattaccttctccaggaaccctccagtggggaaggctgcgatattagatttccttgtatgcaaagtttttgttgaaagctgtgctcagaggaggtgagaggagaggaaggagaaaactgcatcataactttacagaattgaatctagagtcttccccgaaaagcccagaaacttctctgcagtatctggcttgtccatctggtctaaggtggctgcttcttccccagccatgagtcagtttgtgcccatgaataatacacgacctgttatttccatgactgctttactgtatttttaaggtcaatatactgtacatttgataataaaataatattctcccaa

SEQ ID NO: 17151 - DNA, 4576 bp, Homo sapiens
aaacaggaagattggaatctgcctggaacaaagaactgcacctaagcagaccagaagcaaaatgtcttcttcacggcataaggacatctccacttttctctgtacctgtgtgtatagaaatagattagagcacagttgaaattcatggaactggcattatttaagcaactggaattccacactgtaggaaggttttgaaaattgtttggttgtagattttatcttatcctttagtgttgtgttcctactgtgatgtcttggtttttgtcatagacttaagtttataagtttgaactggacttgttcgattataaccacaaattgtgtgtgtgtgtgtgtgtgtgtgtgtgtgtgtgtgtgtgtgtgtatgcctgtgtgtatatatagaagtcattatggcagatgcacagaaattgtgcagtgatgtaaatgttcatactttacagagcctataatttttatttttcaatttgttttttcaaaaatctcttctcggggacaacatctgaagggtatgttgcatgcattaaaaaaaatcatctcacatgcattttatagttttggggaagaaaatatcatggggaggtctaccttcagtatctttagtgcttcttacctggtaacttgagactttaaaagaagaaacaaagaggggaagatatgggagcgaatttattccaagaatctacaatgacattgaagttgttggaggaatgtactgtatttaaaaaaaccttctgtgacacattcaaaaatttcatctgagctggatgcagtggcttgttcctatagtcccagcactttgggaggctgaggtgggtggattgcttgagcccaggagttggagaccagtctgggaaacgtggtgagacctcatctctacaaaatacaaaaaaattagccgggcatggtggcacgtgagtgtagtctcagctactcaggaggctgagatgagaggatcacttgagcctggggaggtccaggccgcagtgatccgagatcacaccactgcattccagcctgggtgacagagtgagaccctgtccaaaaaaaaaaaaaaaaaaaaagaaggcaatggctttgtgcttttgaagatggattgaagagaacgtccaccttaaggctttaaaagacagtgaagctgggtgcggtggtgcactcctgtaaccctgggactttgggaagctgaggcaggaagattgagcctaggagttcgagaccgacctgggcagcatagcgagaccccatctctatataaaaaaaaagatgttaaaacagtgaaattacagaaacagaacatagccaccctttttcatcagtgaccttttcttcacgtggaggtcaactcagtaggtgagaataattagtaggttcagcagaataaactctttacaattaataactcagtggaaaatgatgttcagatggtgaaatgtggaaatgttttagacaactctattttcagcctgtgcttctcactcaccatcctgttgggattaacagttgagggccatcgctgcctaaacatttagcgtgcggtttcccatcagttttaccgtgaatgtgaaaaggtgaaactggtgctgacttcggcagcaggtatactaaaattggaatgacacagaggagattagcatggccccctgcgcgaggaagatctgcagattcatgcagcattccatatttttttaagaaaaggttacactgtgcaccgacatgtggagctagaaggaaaagcttttaagtctcatgtttgctgactataaaaataaatcatagtaataatattgaacattctactttaaaaattattaataaaaccataaatgaaacacttgagcacactttaaaaagtacataaatccatgagtccatatgcctatttttaggttgtctgttttattatccaggatttcatactcagatgagaattagcatcaggaaagcctgaaatgccttaattgtgaactgatatgcaggaaaatgaaatatgcaagcacattggtgaccttgttctttacagacgtcgtgatcagcctccagccatacagaacaaatgagaaattagaagcgattccaagaacgtgtgatggtgtgaaacccactttggaccatcacacacatttcagcatttgaagtgacacaagctacctggtaactgcccatggcggggtcatagtttaaatggcccaatgtcatgtagaggttaatttaatcaaaatgagctataaacatggagcaatcactgtataattttaaaatagtttacctggccaggcatggtggctcacgcctgtaatcccagcactttgggaggccgaggcaggtggatcacctgaggtcaggagttcgagaccagcctggccaacatggcaaaacccccatctctactaaaatacaaaaattaggtgtggtggcgggcacctgtaatcctggctactcgggaggctgaggcaggagaatcgcttgaacccgggaggcagaggctgcagtaagccgagatcgtgccactgcactccagcctgggccacagagcaagactccgtctcaaaacataaaaataaaaaaaatacaaatagctgacccgggtgggcattccaaaatgtccgcatggacgatcacgaaacaatcacggtgcgaaatgtccgcatggatgatcacgaaacaatcacggtgcagaatgtccgtatggatgatcatgacaaacaatcactgcgcaaaatgtggaggaaaattcattaccataatcacaacatttgtatcagaaaaacattacaaatttactttgcttcatgtaattttacgagttggcaatattttcttaaattggaatactctaagagaataggacatggatatgttacaagaagaagtgtattggggcaagtcttgtttttctgaagggaaatgccaccggcctgctttcataggcattgataaagccaggaaggaaataaagtcacaaccaaatagtatacactgtctctactgaattcttctaattccttcgcaacagaagtctaaatcctgcttagcctaaacatatctatagccagcgatgggcaaattatatttgctgtcagcatgatagaataagaagcagaaaccccccagcagtggggtaagattgcgcgcttcatcccctcaaaatgcagttcagccccactccctctccatgcccatcaaacaactgcacaatcacttgttactgaatttcccattcagcgttttgtttctttctgtccatacttaaagaccaaatcatttgtttgctttgaagaaaaagcaaaaacaagaacaaaaacaccaaatcatttgaaatcactgtccattaaaaaaaatcaccagtggaactaaacagttgagtggtttgggatgtgttcgccatttctgtgtttgacctacatggcctctaattctttggaccattgtaactgtgaaactatggcttaatactgttaaagaccccaaggctccactctgtagccaggtgcacctcaggctgcacaaataccccaccagaatgtcacaatcattcattgctccagctactgagtgaacagggtgcaagacagcactggcttgggttgtatttttgcagccagttaactttgcatcaggtctacacagtccttgcagcctttgatttctccagttgtagagatttgaaatggggtgcccgggttcctctcgtttttccttcaatctacctagcatgcattttacacacattggaggagtcgtatgcactgtttttctgttgctgatggaggcaagcaggccttctaattagtctaacttaaacggatgggattcacttaacaaaagcaagaagaaaagcacacgaacaggtgtcttaatgcatttggatagtttctttgcggggtgtgtgtgtgtgtgtgtgtgtgtgtgtgtgtgtgtgtgtgtgtgtgtcttggtgaaggtgaggggctgtattttcaccaagccttttcataatcaagtttgctttgcaaaccttatggccttgcaccccgcagaacagtcccttcctaatagcagggatgctctgtcatggttttctgtaaattatcgtgtgttgggaagttctgttgaggcttagtttgatcttccatggtggacacgtctgttctgtatgtaaaaggcattacaattgtgttttagcagatgagacttgaagcctttccacagtccttgtgctctgagatggctgttgagctctgctcaactgtcgtagctgaattctttctttgcgctgaacactgggcagcctcaccatgttgccaacgtgcttctggggcccctgtcactgccgccggatgccgcgcacacaggcagagtgccttggcaggtttgtgcaccccttggcgagccagaactgggaaccccgcggggtgaccccttctcatggggggtcggggaggggagtgcctatttttaatcctgtctgtttgttgcacaatggaaatcactgtgatttgtacatatgccctaggaaaattttactgctgtctaatttatgtaataatactgttgattccaggtttgtttaataaaactttgtatcttttcagaa

SEQ ID NO: 17152 - DNA, 2773 bp, Homo sapiens
ctttgccctatttcccttcctatccctctgccctacccgctcagcaacatagaagagggaaggaaagagagaaggaaagagagagagaaagaaagtctccagaccaggaatgtttttgtcccactgacttaagacaaaaatgcaaaaaggcagtcatcccatcccggcagacccttatcgttggtgttttccagtattacaagatcaacttctgaccctgtgaaatgtgagaagtacacatttctgttaaaataactgctttaagatctctaccactccaatcgatgtttagtgtgataggacatcaccatttcaaggccccgggtgtttccaacgtcatggaagcagctgacacttctgaaactcagccaaggacacttgatattttttaattacaatggaagtttaaacatttctttctgtgccacacaatggatggctctccttaagtgaagaaagagtcaatgagattttgcccagcacatggagctgtaatccagagagaaggaaacgtagaaatttattattaaaagaatggactgtgcagcgaaatctgtacggttctgtgcaaagaggtgttttgccagcctgaactatatttaagagactttgtaaaaaagaaaaatgtatatagctgtgagtttaaacaaaaaccacaaacagacaaacaagaaaaaaagcttttattggtgttttcactttgaaagagcttttagcaaggttgtgcttttcattgtgctctgtacgtatataaatatatatatatatacacacacacacacacattagtcatatcacctctgtttcctccccaacaaaagaggcttttcttcttaattacttgtggtaaacaaagacatgggattttcttacatgagattctcatttgtaggaggatgtgatgtcccacagaagacccagacggtctgtgtggcctatttcccccgtcaggttgcacaggtgcatgcaagagcattcttaggagaccactgttttgaaaaacttttgacttgtacgtgttagccttcatgaaattgcagtacagagatgggtccccaaagtggagtgtatttacagcttgttaaattagagacatgcacacacaaagaatcagtagggagaaacaaaaatacaagtcccgttctgtagctctggccctttgaatatgtttaggaagagttgcttcccatttcagggccctgccaaaaaaagaagaaagcttgcctttggtggggctatgccccttggagtaaatacggctctgtgttccctagcagctgcgggagggtttggccgatgaagtacctgctcagcttagctaatcagattgaaggaagacatgtgtctttcctttttgtttaagcactcggtcccttatttatcagtaagcaggtttttaaaaatcttttatatcatttatgggatcaaacatatgattgtctgaaaacatcactttttgtggatttgtgtatccggtcaccaaacggtgaatattatagaagaatgggggaagaaaggatagaatattaaaactgctttgcatgggttttctgggaaattaggataacttcactgagaagacattgaatggaaattattcacccattttaaattggtgacctagggatcagagatttgtctttccaacagcttgtcattttttcatttctcttctcatttttcaggaaagttttgagtgttataaggtggaaggaaacatagtagcaatggatacttttttgaaaaattattgcattaccaagaaacagtagccaaagatatttgaagatcatgttcctcggctccattgtgggttattctagaaatccagtcttaaatctctccgctaaagtggacattccccataaaaattgtccagctgcctggctcttttgcaataacaacctttgattactgaatccctacactcaaactatagtgatatatcagtgtttgagagtgacctctagaaaaaagaaaagtgtttttagaaatgcgtacaagtcacccccaaatcctattgcttatcttgggttaaatttgagagtgattctctgtatataaatatgtgaaatattattatctcaacttagcacacgtgaagcaacatttctttcctacagagaggtgtcatggtaagatttcattccgaattcattgtttcatagagctatgatcaggccatttctgcaagcaatgtatgaccccacctgagcaaccacaaataggctctctgtgaaactacaaaggaagttatgtgtggcatccatgttggtttcgtctgtctgtaatgtgaattccagtatttgtttagtatttccagttgtctcctgctagcaatatgtacagtaacgcgtcaggcttgtgacatttgaataaggaaaaacagagttcctgttaagtgaataactttagcttttacaggggattatgatcaaaagtgattttagtacatcttaaatgatatcttatttctacatggaaagaagttatagaatcttcatagagttctatgagaaaaaatatacttgctatctataaaaaagagaaaaaagaaaaaaaatgagaaaaaagtaagaaaaaaaaaaatcctgtcctaggcttttactcttgatcttcaaaggcacgcagggtttaatggttccttgggttattattttgcagttttgttttttattttgccttaagtaatgatagaagatatatatggccggacacatatgtataaacttttcagcagcatttttaataataaaatatcacagtattttct

SEQ ID NO: 17153 - DNA, 126 bp, Homo sapiens
acggccagctactcccctatctccgagagcagcgactaagttcaggcccagccgccagacctcagagatctcaccagcggggtgcttgccattctgaagataataaaatgaatgtgttgcaaattg

SEQ ID NO: 17154 - DNA, 1376 bp, Homo sapiens
gagggagggcctcagtcttccgcccccagcccactctcatggtccacactgctgggggaaagggaaaggaaatcagcaactcttcaatcccaacctgcgctgtgattttagcctcctgagattggagtttccatcccatgttggtttgtcccagtctaacgtgttgataaaatgtgacttgacggttgagacaaaaaatacagtagagacagaaacgaagcccagaacaaagatgaaacttgaattaccatctcagaagtcaagctgatggagtatgtgataaagtgaatgtacatgtatatacacacacacctccatatatacatgtgtgtatcagtttggtaatatgcaggtaggcattacatgcatatgtatgtagacatatgcatgcatgtatatgtaaaatatatacttttccaagacaaaatggaacatcacttctctcttctagtttttctgaacactggctgggaaatgtaaactgtgtatgcatataagtatatgctttatgtatgcatatgtatgtagatatgtttatatctatcgtctgcatcactctcctcagtgttgatgtcaacatgcaatgacaactgataaagcgagatggtagttctgcctggtttgcagtctgagtgggaaagtcctgtttttgatgagcactccttgttagctaacatttaaattctttttgtgacctcagaatgtctctggatctttcctcattgactgactctgtgccacgtcatccatagtttattgttagtatgaacacaactgtaacatttacctggtatctacatccttacctgcattggaaaatgtttgctacctcacaacaaccatttgcctcctttaagaacactgatgggctgcactttttggatagaaatagaatttgatttcagaatgtatgcttggtgagtctcagtgcccaggaacacttttggaataatttatcagacattgaacttctgtgattaatcgcttttatagatttactcagtctttaaaattcgtctctgatttgccagagaaaaacggtggtagccatggaaatcgggagtgaaggagcactgcttcattgtggctcagcccttcctaggggcctctgccctttgatgtccttgagctactcttcagctctggaagttgtggacaaaccgtaggaatgtatgtgtgcgtgtggtggagtgattgtctgtgaatgacaggccctggctattgattgatgttgcatcaatttagcaaattcatttcctcattcttgatggcctgaatatatgtctgcacttttaatgctcctcttaaccagttgtaacatcttaccatttccctaacaaattgaattagtttaataaaatcttttgacacatgtt

SEQ ID NO: 17155 - DNA, 1923 bp, Homo sapiens
aatgcataaaagtttataatgcaaaacacgttttagatagtttttgatggaagtttctaatcaaatcctttttagaaaatctatcatgactcaattgtattactccttgtaatatttgtgtttatttttaatatttgaattattacttagcacatggatataagaggcactttattagaatttgacaacgtcattaagaaggatacacttaggtgataaggaatcatttttggtgaactgttgtgtcctttaaaaaatggaggaggataggttctttgggtaaattgaggaacatggaaaatggagggccaccacttaggttccatggagaatatgtggcatgatcttgacgtgaagcatgggtgtttccgtgacttagctgtgtccctgtagctctggaactgaaggaactaggtaggagaggaaggatttgagaaataggcaactcatggttaaagacctttgatcaggactggaggaacaaaggtttgtgtattagtccattttcacactgctgagaaagacatacccaagactgggcaatttacaaaagaaaggtttaatgggctcacagttccacatgactgaggaggcctcacaattgtggtggaaggtgaaaggcatgtctcacatggcagcagacaagagaagaaaacttgtgcagggaaactcccctttataaaaccatcggatctcttgagactcgttcactatcatgagaatagcatgggaaagacctgcctccatgattcagttacctcccactgggtccctcccacaacgtgtggcaattgtgggagctacatacacttcaagatgagatttgggtggggacacagccaaaccataacagtttgctttccacaggtgtgtgcagttgctcccagtgcagttaggggcagatatccagaagcctaggagattttgaagaggcttatcccctctcatcttcctcccctaaaccccaccccagtttaggagattatcaagctggttgtcattcattctctctctctctctctctctctctctctctctctctctctctctctctctctcgccatacctctctgagtatttagctattgttctatatactggatacatctattatgggaacttaaatagataaaatactactaaacacaaagaaccaagtagcctagtaaataagaattaaatccagaataatcattcacttctcatttttaaatcacgttgtactgatcccaggttttttactttctgagtagttgtccatcactttgaggacttgtgtatgggcttgtaccaatttactgacactgtcttaaatcctaaatctgtttttatgaggttttgccaagcaagaactcttgattactaagaggcagttagagacaaaccaatttaattccatgtcttcaattgtcacgcatttcttcttttactctttgaaactattctttgagtcaattttatggttctcagaagccaaaatacacaacttttagcacataaacaccaacgatggcctctttttgaggagttatgcatagacccactctagagtaatgatggtccctgtggtatatactttctcctactctagcaaacatgtagtttaatcttaatgtgttgtttccataagtgacatgaagtggatagattctcaattgttatgtccacttattcactaggtaaattttcagttttaatacttttctccttaccccttcctttgatcatttcatgtgaatattctatttgtatgatacactgtatttcaataaattccttgttgatgtacccttaaattgaagaaatttaagctgcaaaaccaaatctcattgtataagacttttttgaagtatcttgtatcgactacatatgtatttgaccctgtgggaggatggtacttttctttttaacttttattttaag

SEQ ID NO: 17156 - DNA, 88 bp, Homo sapiens
gttcaggcccagccgccagacctcagagatctcaccagcggggtgcttgccattctgaagataataaaatgaatgtgttgcaaattga

SEQ ID NO: 17157 - DNA, 4121 bp, Homo sapiens
actgttcaaaaagattttgtgaaattgcacagatgtgtaagcttgttgaacttcggccacgagacatgcacacttccagaggcagtgggaactgctcagaggcccggactctcctatgtgactttagtgcaggaagaacttctgtcaatcatggacgcatctggagacaagtgagaaacagtagattggtgaagacagacaccagttccctacaagcatggagaaaatgaagaataggcctgtttaatgctaaattttgttttcatgtatggtgtcgctcatttctattgaattacaacagaactcagttttccctgaatttggagcaccaaactccgccccaaaaaggagagtaacaaatacacaattcacacataacactaagcgtaaatctaatcaataaaatatatttttgactaaattattgattcgatatgaaaaatcaactaagattacacagctttgtttttttgaatctttcctaagatcatttttatcctaggtgatttttaaatgaaaatgtgtaatctaaaatataccagcgaatttaaatctaaaaatgctcctactttaagtaccttgtgctgctctttatgcaaaggtaaatcaaagttccctctataaattatgatttacaaaagacacccaagccagaggaactcaatgaaataagctgctaatcagattttaccttggagaaatgaaaattatttcttggggatgccttttaatatttgatcctattatgtgagagattttcctgatatgttatcttatttatattttcccttattttcctcaatgcagataatagcttttggtgcacttttgtttcaccatctgaaaattcacaaaacttcttgcttcaaatgaaaaaatcccaactattgagcatgtttaaatctttgcagagatttgccttttcttaatcaaagaaaggtctttgtgtgctagaatattattggtaatgttttaaaaattcctttgattgatagagaaggacagttatttgcatttaattcacccatatgctttcaaatctagtatatcttactttttggaaatgttttatgctacaaattagtgccttgtagcatgaacttaagtcaaaacgtgttatcaatatagagtgttgcagtgtatattgtaacaacctaaaacgcagagaagtttaatttaatactgttttttttcttgaaggaatactcacatacatggtttgaaatgtgcatagatatgcatgtctatataattataaatgcatgtgtatatatatgcaaatatatgtacatatacatgtatatacacacagacacatgcatatacatgaatataccttgagcatgaatccctggagaaatcgttttcgtagctcaccaatggtgagtaaagatacagctcttttaaaggtcataaggataatatattttccccatcaatgctgattctgagaaaagagcaatttatcaaaattaaacactgtaaaagaaaggtgtccatatgtctttacctacctaagtaaaacaggaagaaaatcagtaacattatccttaggttttgacaatggtacttgcttcttgttgttttattgtttcctgaattcatgcagatgcctggccattcctgggaagagtggataactcagaagtcactgtactccacagagcctcactgcagtgtctaaaggtagatgcaaattaaaatgcagggaaaataacttttctgatgttgatgcatgtctttgggaaacacatttataaacatggatacctgataatagatattgaaacccatttcctgtgtgttaaaatatttaaaaagtggatattccaggaatgttttgcagctttgtacaagtaacataaattggacacctcagaatgaaagttcatgttggttctgaatggttcactgcagctcctgtcacaagctgggatggatttatcacattgagttatgaaattacctggttctaagaatttttgagtggcaaaaatagaaaacaatcttcatttgaaaacatccctaagcttgaataaatggataccatagatagcttctcttttttattctggtgtcattaccagcatctgaatttcaagttcttaaaatttcaaaaattaaaatttttcattattagctatccatttatcttttacatgaacttgtcatgaacaaattcaaatgtttatgccagcaaatttttgtactgttgcatagttaaaaatgctgggagtctctgcatagatacaaaatattattaaattattacataaatttaattttataaaatttaatcatgcttcttttgtctgggtaatagacattggacagatatttttagttcagatggtgattctgaagcttacatctcccttaaaaaaatctaaagcagctcttatgggcttctaattttaatataaataaataatttaaattttattggtgttattggaagaaaaatgctattaatgggctaataaaaaacatgtgtttctcttatggattttaataagctccagtattattcaaatgatcaaaaatatagttataattttttgaattttaaaaatgtgattgctctaataaagaataaaatctatgctttttaacaaacatagttttggtgcctaattctgtaatatgttttattgaaattagattcatttctctaatgtgagaaaaatatatccagtaatagtattgactgtttaaaaaattgagctcatcaaaaatattgtcatcaaatacaggtggttaatctgacatacattgcagttacatgcattatttttatttacaacatttgctccttaatgatgaatttatctgtgttaccctgtttttctacctggaactccatagaatgatgtttgcaaaccaacatgtgctcttttcagtcattcactgttttaatatgacatggtagagaagataaggtttatggcaggtaattttttgtaatgtgtattaaacgaagttcaaagattagaaatacatctgtgtcctgaaaaccttagatacatagccgactgtatacagaggttcatctcaacctcaacactattgacttttggggctggatagttctctgttgtgggggtttgtcttgtgcactgtaggtttttagtagcatccacactttctcctcaccagatgccagttgcaccctcccccaagttgagacaaccaaaaatgtctccagatattgccagctaccccttgagggatggtacctctggttgagaaccattgctagagaatgatctttactgaatttgccctttataagaaacccagtgaatttctagagcaagtcccaaaaactaagggacagctaagaagttattatggttgacttcaaaggcctaaactgtgttttttatgtccactaaacaacttgattaaaagacggaattttgactcgtgtctgtatcatacaagtacaaatactaattttgccctatgtatccgtaaatgtcatttgtgattttgacttatttatttaatgccctttcttatgccgtgggttttcaagtttactcatttctatggttgcaaataactctaaaacttattatataaactttcatattataggcagaacacaatggctaaatatctgttgcatgtactttaaagtttattataaaatataaacagatatataaagatgttgactcttacctgtgattttgcatggtcagactcggtgtcaggtacggagaggattctcatgactgtcttacctctactgaatattctagtgagttatatgatttacggagtgattaacagaggtctatataaagttacttttcccctttacttaattatattgtagtgtgcagataacaaaactgctaccttctcatccaagtggtctgtagaattcatgtcccttacagtggtcatttaaagtcaatatttatttatgtatgtaataaaaaaagttggatttttgtgtatgtctgtcacattatttagagagaagtaatcttgtaaaaatgttttgtaaaaaacaaaaaagtattgtaaatagtcttgatattctgtgactcattattttcatgttagagtttgtacatactggttcaataataaagtatccttaaaccaga

SEQ ID NO: 17158 - DNA, 375 bp, Homo sapiens
cttttggaagagttggcacttcattgtctcttcaacctctgttattctgatgactgaagaaagaacttgaacctatgttatatgatacgagcacaacttgagctacagtaaactacatgacagtgttttgataattgttgtataaatcggtatagctcctctgtcacttgtctgttaaatgccagacctcgtttctatgatctgttgaatgaatcctagacacttctgtgagaaggcagggattgcacagttatgtacatggtcaattaaattttaacattaaagataatttagatttcagttcacctctgtggatctgtatcagtttcaaaaacgtagaaagcacgggcatagaaaagtacatttttctctaat

SEQ ID NO: 17159 - DNA, 380 bp, Homo sapiens
cttttggaaaagttggcacttacccagttgtctcttcaacctctgttattctgatgactgaagaaagaacttgaacctatgttatatgatacaagcacaacttgagctacagtaaactacatgacagtgttttgataattgttgtataaatcggtatagctcctctgtcactcgtctgttaaatgccagacctcgtttctatgatctgttgaatgaatcctagacacttctgtgagaaagcagggattgcatagttatgtacacggtcaattaaattttaacattaaagataatttagatttcgatttggcctctgtggatttgtatcagttccaaaaatgtagaaagcacaggcatagaaaagtacatttttctctaat

SEQ ID NO: 17160 - DNA, 332 bp, Homo sapiens
aggggatgtgctgggggtccagaccccatattcctcagactcaacaattcttgttctttagaactgtgttctcaccttcccaacactgcactgccgaagtgtagcggcccccaaaccttgctctcatcaccagctagagcttcttcccgaagggcctttaggataggagaaagggttcatgcacacacgtgtgagaatggaagagccccctccagaccactctacagctgctctagccttagttgccactaggaagttttctgaggctggctgtaaagtaagtgtaaggtccacatccttggggaagtagttaaataaaatagttatgactg

SEQ ID NO: 17161 - DNA, 3812 bp, Homo sapiens
gcgtctggccacatggagctgctttctggggaacagtaaggttcaggccactatttaggggactgagaaagcacaggcttcatgagtgtaatgaaatctcaccagaagtgtcccgaaatcggctcagatagggctcaaaacaagagattcctctccttttactgtgtcttgtattaagtacgggctttaataatttctttaatttttttgtatttagaggaaaatctatagattatttataagagaaacataatcaggattacaacttttaggaattacttggttttgcacattaagaggcccataagtttatcagctatttacaaccttcatttcatcacaatctgtgggcttacaaaaaaacaaaaacttttgtagttttgtatgttactcatcttcttacctgatatcccatgatgatcccatggtaggtcttctcacctcgatggtgcataacaggatgtgtttgaacctagtaggggaggaaacaggctttcttactctggtttaatttgaagtgttttaattgtgatgtcaaaaagttgtatcagatcaactaaaatggagagcaagacagagaatgaaaagagttgattttggacctcggaccttgccgtggctaaatctttaccttctcatagctgatgggataatgttggaaagaaaggttctgaatcctttggccacattttgccctgcttctctcagggttaagggttctggaagaacattaagaatgagattgcaattgaaaatagtcattttgaatcctattgattattcaaaaattcaggctgatttgtcttttatcagaggtaggattctgttttatagtatagaatctactttatccttccttttaatagttcctttagacctgtgaaatttcttcactacatttaatagttctcctatttcccgctcccccatatcaattttccttttgtctccggggctgagtaaataaacatgttctgtcacaaatagcagcaccactttggattgattttgctctccaggacatcagcacatggccctgatcagcactaccacatccaaacataagtcactgaaaaacacttaatatttatgagttggtaatgacaagggacattgtataaagtactatttgctagattcatgcctcaaaagttattataaacagacctttattaaacacatcttgaaagatgtagaagtccctctatagtctagtatagtttacaatagagttgtaagaccaaaaaaaaaaaaaaaaaattcaaactcgttattcaggaacctgcttataaaatgtcagctgggattctttgcatgccaatctgatgcgttggaatggtccatgaattaaggctttcttgagcagttcttggcccagaactctggcattggttctagtttgatgaagggcatgacctctataaatggtttcaattgctaaaatatttacctgggatactgggtcagccattttgactgagcagactagtggatttagacattgtttttagttattttgtttttaaccaaatcaaccaactgcctccctgaaataagtcaatgaactcattgtttcagcatcacgtggccaaaggtcatgtgattgcaaatctggatttcaagggaggccaagccagcttcctgggtccttccatcctcttccctagcagacactctcctttttcttaacagatagattctatatatttactatattatttatacccagatgaatattttgatagatacctaagacaatttcacatctaaaagatggacgcctcaatggaaaaaaaacaatctttctctggaaaccttataggtttttctttttattacaatataaaagcaatgtgtgtttgccttctctgagtaaactgaaagggttgtctcagtaatttttacatacattttgggtaactggataatggatattttaatgcactttgtacactaacaggttctaaataaaagggtctaaaactcagcttctgagtttttaaaatcacggtctccaggtaccaataaatgctacagtttgccttatgatgttaacataaaacacttagtagaaggacaatatttccatgaaaataatgtttttcaatattaagaagttactactcaaattttcacagtaagccatttagggtatgtttggctatttttataaggacatgagagattatgtcataattttgttgtggaagtctcactcttggctaacttaaaagcattgtggatagtagcagttactagttccaggttgtcatatttacaggaaaatatgtatatggtgaaaggccaccgtgtttaattactataatgatgtagaaaagattcccgtgtgaattttttttttgaaagtctaaaaaatgtatgctgtaaaaatttgctgcagtgtaattttgcattctctttaaactgattgaggtcacagtattttattatttggggtcctcaccacaggaaacactgcgatacaggggcaaaagagatggcagtgccaattaaattaatacaacaaaatcaatgcagcaccaaccaagactgccaggtctggtgtcatgggtatgcccagagcccaggagttcagaagggccctaagcctgatttaatgctctgctgttgatgtcttgaaattcttaacaatttttgaacaaggggcctgcgttttcacttcgcactgggccttgcaaattacatagcgagtgctcataaaagaactcagaaacgtggtacctctcttcctggtggatacaaataaagaaatctggatccaaagttgaaagttgctggcgatatcattcaagtaggactctaaatagtggattaagatgagggtgggcctgggtgaagattctttccagctttaaaagaaagtgacttcaaaaactgactgcaaatattgacgatggtttctgctggaggaaaagaaacagcttgaatacagacaggcttttttattacggtactgatatattgaccttaaacttgctgaggaactgaactaacgtcctccagtgaccgtggaattccatctcagctccaggaacatgcagatacctgcaaagagacacgcatatatgctggcatacatgtgcatttggtgttgggaagttgaccatctggtctatcttaataaaatggtaaaaagcacaccaagacaatgatgggggcaggaggatgtttttgaaaacagcgcttctcaaccagtgctcgattttgccccccaggagacatttggcaatgcaatggcaacttttggttgtcgcagccggggaagggaagctaccagcatctagtgcgtagaggtcatggacgccgttaaacatcctacagtgcaagcgcagcccccgaccacgaagagttgtcttgctcaaatatcaacagtgctgcagtgtagaaacttgatcgttggttttcttttaatgcaaaactctcataaaaacctttcacttttcctgtcattgattatatgcttgatacacccaaaaagaaaaggggaggggcaccaattcacctacactccagtggctccatcacctttaaaaatatttataaaatagttccaaaaatctgatatctgaaaagcaatccaagcctgtgtaaatgggaatcactgataagtatcatcatctgtatcagcttggcttggacatgaaaaattgattctctttatgtcactccttgcacctggacaaattcaatccccggtacttaagtcacactgccaagccctcggccctgactattgtcttgattgctgttcctttctggttcaaaataaaatcatttttgtggcaccaaga

SEQ ID NO: 17162 - DNA, 1988 bp, Homo sapiens
gttcctctggagacatttttgaaagcagctccctaagagcggggccctgctccctttctcaagggaacctgtccccaaattggcctcggtggcaggggagccccgcagagctggacagcgacacgcagggggctcggaggactcaggccgcagcccccgcgacggagggcagggcccaccctgcggtgtcgcgcgcctgcagcacgccccacgtccaggtggcagggaaagccgagcggcccacggccaggtcggagcagtacttgaccctgagcggcgcccacgacctcagcgagagtgagctggatgtggccgggctgcagagccgggccacacctcagtgccaaagaccccatgggagtgggagggatgacaagcggcccccgcctccatacccgggcccagggaagcccgcggcagcggcagcctggatccaggggcccccggaaggcgtggagacacccacggaccagggaggccaagcagccgagcgagagcagcaggtcacgcagaaaaaactgagcagcgccaactccctgccagcgggcgagcaggacagtccgcgcctgggggacgctggctggctcgactggcagagagagcgctggcagatctgggagctcctgtcgaccgacaaccccgatgccctgcccgagacgctggtctgagcccgcacccagccgagccccccctgccccgagccccccgccctccagcccaggggggaccgtgggtggtggccactggcacacttagtgttcttctttcacacttctcaaaagtgacacaagagaaatccagttcacctacagaggtagagcactcacgcccccgccattgagaataaggttccattgcgtagccagccttaggaaaaacaaacagaacccaaaccagatggcaatgtccaatctaaaaacgtccctcttggctctataatataagatacaactcttgcttggtatagcctaaccgtatttatgtgtcttcggttttgactattgtgtattctgtaacagattatgtataatcatatatgatatattcacaaagagaaaacaaaaggaacttttaaaaaaaaaatcacttcacttatattaagcaatgagatatactaaacaatgagattctatagaatgttctagaatgtgcacaagcgggtttctgtgcttttgccatagctttataactggggataacccttccttcgataccaaacactaacaagaggaagcagaatatgagaagccatatttttacataggagtcagatacaaaaagaaaaatcactgaatgcttttagatattgaatacgttttcaggaaaatgctaaatctgatagattacgaaatatatttttagaacttgtttagaaaggattcagttaaccaaacaagaaaaaggcagtgcctcacaaagaaattaagaagttgtccgtcccacgttacatcaaattcagttttatataggccatatataatatatatttataatgtataatttttatgtatttttcaaaactacaaactggaatccaactataaagtgtttaagaatctacacagaatattcaaattatagaacatgttttttccctttgccccataatcagtatttgccaaattacatgcaattccttaaaaactaaatcacatttggtaaaaggcctacagctttgtacttacattgtgccaaaggctgaggaaatgttttctttcgtaattttatgtgtattgtaaaatgttctaccgtactttagtagtttgaagtttttcaagtgcataactatttttgaccagcagatggcgatacgcttcagtattttatgcaattttttttcacttctgaagggaaagtgtattataaaaaaagattttttttttttttataaaacatgctactcttaattttcatgttggtgatgaaattcccagtggtgtttcttaaggttctatcttgtgccatgatgaataaaaagttaagcaaag

SEQ ID NO: 17163 - DNA, 461 bp, Homo sapiens
ttcaacctgcatttaccgagtacctgctgaacgcctactctaggaagaggaaggtatggcgagcccagtcgttggctgggagggtccctgcaggccacactccaagtctcagatatctgggaaataaacgcatgcccagaggagccactcctattcccagctgattctttttccctccagcatcctaggaactttatgtatactggatttgggttgcatatttgctagtctgaggtgccacccaattactgctgttacatttctaaagaaaacaagctgaacctactatatgtatgaagacaaccttccagaaccaaatagtgttagtatccaatgacaagagagcactatactgggagtcacaaacctgctctgccactttcaacctgcaggatctccagtgagcgattgagcttcccagagtcccatttcctcctgctgtgaaaactcagaatgataac

SEQ ID NO: 17164 - DNA, 401 bp, Homo sapiens
ctgcagcaagagttggcacttattcagatgtatcttcaacctctgttattctggtgactgacaaaagaacttgaacctatgttatatgatacatgcataacttgagctacactaaaccacatgacagtgtttagttaattcttgtataaattagtatatctcttctattattagtctgtttgttaaatgccagaccacgtttctatgatctgttgaatgaaccctagacagttctgtgagaaagcagcaattgcacagttacatacacagtcaattaaattttaacattaaagataatttagttttaggtttggcctctgtggatctgtatcagttccaaaatgtggaaagcacgggcatggaaaagtacatttttctctaataaaagaagacaaaccctt

SEQ ID NO: 17165 - DNA, 2165 bp, Homo sapiens
atgcagaaaattccaaaataaatgatgtcaccacaatggtgtatactcaggaatgtgtacattgtaagttacttgattaaatagcctggaaaacttttgtgtattctcagcttatctaaacctaatgaaattccttttatatttaaaaatagtacattctgtctcatgtcacgtatcaatagatcaattggtatttccttgtgaacagtgttatttataaagagttcattatcaataatcatgttttttttttttttttttttctgatacagagtctcactctgttgccaggctggagtgcagtggcgcaatcttggctcactgcaacctccgcctcccaggttcaggcgattctcctgcctcagcctccaagtagctgggactacaggcgcgtgccaccacgcccggctaatttttgtatttttagtagagacagggtttcaccatattggtcaggctggtcttgaactcctgacctcgtgatctgcccgccttggcctcccaaagtactgggattacaggcgtgagccaccgtgcccaaccatgaaatatttttacttaaaaattgggaataagctcgctttttttttttttgagatggagtcttgctcctgttgtgcaggctgtagtgcagtggcacgatcttggctcactgcaacctccacctcccgggttcaagcaattctccttcttcagcctcccgagtagctgagattataggcgtgcaccaccacacctggctaatttttgtatttttagtagagacagggtttcaccatattggtcaggctggtcttgaactcctgacctcgtgatccacccacctcaggaagtgctgggattacaggcgtgtgagccaccacgcccggccatgaaatatttttacttaaaaattgggaataagctttttggttttttgtgggtttttgtttttgttttttgttttttgtttttttgagatggagtcttgctcctgttgtgcaggctggagtgcagtggcacagtcttggctcactgcaacctccacctcctgggttcaagcaattctccttcttcagcctcccgagtagctgggattacaggcatgcaccaccacacctggctaatttttgtgtttttagtagagacggggtttcgctattttggccgggctggtttcaaactcctgacctcagttgatccacccgcctcagcctcccaaagtgctaggattacaggcatgaaccaccgtgcccggccaggaataagcttttgacttacccaattcagataggttgatctttggggttttttttttttttttgagatggagtttcgctctgttgtccaggctggagtgcaatggcagttgtttcaccgtaacctctgcctcctgacttcaagcaattctcctgcctcagcctcccaaagtgctgggattacaggtgtgagccaccgtgcccggcccagataggttgatcttaatgtaacaacccaaaaataaatgtcatagtcaagatttggtagataaatttaaaattaaaatattctgcagttgggagtgaaatgtgatagcacatacgttgacattatgcatttagagatgttataaaaatgtataggcagtatacacagcactactcaagaagccaaagaaacacttgtgcagtgctaagtgtcacatgtctgcttccaccagaggctaggaatagtgatcctgctataatgtgagaacccaaatcatgtttataaaataggacgctgggagcagttgcaggccacagtgaagtgtgttgcttctgtcactttatattcttatatttcctttccctcagacagtaaactgttgatactcgtacttgtaaaaaattgtaaggcaatttttagtattgttgtcaaagaaaagcttggattacattaacatttgtattcagtcttttaggtgatacaccagagggggctgggaattgtctctttgttcctataagtagatcttaatgtaaaatagtaaatgtccattgaaaagcaagtaatacagcctgtgctaattgggagcacttgaacaattttgttccattctgagtaacttttgagcaagtaattctaagctttgtcttgtatccttgtgtgaaattgcataatttttaccctatttgatttcttaaataaagatgtttgctcaagat

SEQ ID NO: 17166 - DNA, 1937 bp, Homo sapiens
atgtttgccagagtgtttcggccgacgtatttacagctctgacaaatcatcagacagctgctctgcagtacagatgtgtatcccaccaaactaatgtagatgtacaaacacttcactgtctgtctcaagctgctgggatgtatctctaggaaaaccttccagtgggtaaatctttttctttagaacaaatattggaggtttcatgttagccattttaaaaggcaacactttgacaaaatgatcgttcatactttgggaatttgtggcatgttcacatttattgctagggcaattctaccaagacactcaatggaatatgtcacactccttaatagggacctgtgactccttaataaggacctgtgacatgcccagcatcaagggataagaccgtaaattcacatatatgccatctgtcctcaagtgttatctacataggaaataaaatggaattgatgtaaagttccatttctgacagctgacatttattaaactttggatcaaagataatgtgattcttatgattgatttctcaaactagcttttccctcccaagtccaggacccattaatttcctgagccaatcagaaatatatttttcaataatgctaaaattagctacaattctgctgaccctactattaaagaatctggatgctggactcactgacaagctttccagaagcaattttataacagatttcattttaacaaaatactgatccaattttcattattcttgagaaatgtcagctttgccttaatgagtatttgctttaaatttctaagaatttatatcataactagagacccaaatatctttcacagaattttgttccataaatgtttttcttaattattaagaagtgttaccttattaaaatgaccaccattctaaaccatttttcagtggtctggatacgaagtttacagtttcataccaactatctaaaacctaattgcaaattgaccacagacctctaacctcctacttttatagacttgaatacttaagtaatttaaattagggttggtatttcatttttttcttatctaaatcttagtttcctggaataataaagtttgatgttcagcaagagaactgcttgagtttaagccattttcaaaagaaacttgccttttacattattgtgttccagaacattaagtgactgtaggtactgggtattagtgatggtaaactttgtgttgctctttatgaaatgatccatataactgttgggtgcatcagtgcttttcaaaggggctgcttactatagggttaactatgtatattcattgttaagagttaacttgtggtttggctgtttcctggattttataacatacatgtgcagaaatgtattcaaatgaaaggaagcatacctttatcaagatgctattaaaattgaacatcaagtataatatttcatttggattctcttttttggttaatgcctaaaaatgcctatttgggatttttttttttttttaaattaagagaagctctcttctgtgtagaacagttgttccaaaatagcttagtgttttgttttcctgttgcatgacagatttaactattctttccagcagtggaggtgctgtcagagtccagtgttctagaagaggcagtgtctaaagcctaattttacttttctaattctggtagctattaccaggaatttttgaaagttttgtttaagtagtctaatattttttatgtaaagagcattaaattttgctatgtataaatttttgtaacctaacagtgaatcaatattttctatcagtgccaagggcttcctgtagttctattcaagtgttacaataaatatttgtagataatagtcaatacttgtgtatgcttattttaaagatctatttaggtggaaatagttgtggatgtactaagagtaatgaaataaaattatagcttc

SEQ ID NO: 17167 - DNA, 564 bp, Homo sapiens
attgcataaggagttttagagagctatgctctgtagcatgaaatatcactgacactccagactaaagcagagtctaggtttctgcaattttgttacagtaatttgtaaatagctttagtaaactcaccttgcatggtagattaataagatgacttactgtacatgaattacacaataatgagatctggtggctatttccacattttgaaaaggattcagttatttactgacagtggtgagcatcctttttaaaataatgttctcatacttaaacattagagagcagtatctttaaatgaattattaacactttggaatacttacattttctgttatttttgattgcctgataaccagtttcaatgatgaaaatgaaaacaagtgctgaagatgaaatggaagagaaccgttttaatctggattttgttttgtcacacctggaaaatactttgcaaatatgttctaaattgaaaacaatttttttatgatcacatggttcactaccaaatgaccctcaaataagccagatgaaaatttgaagaaaaaggtcacccagttctctgg

SEQ ID NO: 17168 - DNA, 2186 bp, Homo sapiens
gctcagggcacagggtacccagcctctccttcttccttttgggtacacgctctttatctctccttctgtacatttcttagggaaaggggactttgtactggggtacaggcatgttcaccacagtcccagtgggcctgtcacggggtggatgtactatgccagccacttggaggtctgcaggacatgttctgttgccaacatgataaattttctcctgacataaaataattttgcatatactatactggttttttatgttgttggtaacagttcaattcattaacgttcttgcctagagatactgcctggtgttttgcttttttatcttttcttgtctttaacctgtctgaactacacaaatgcctttaaaaaaccagatatcctctctgactctagctccattagcccccactaaaaatgagccaagtgtgtagtgagacaaataccactacctgtagtggagagggatgcatgttctataaagggccagagagtgaatatctttggcactgcaagccacacggtcagtgttgtgactactcaaccctccctttgtagtgtgaaagcagctgtagacagtaagtaaacaaatgggtgtggctgtgttctaataaaactttatttataaaaacaggcggccgggcgcaatggttcatgcctgtaatcccagcactttgggaggccgaggtgggcagatcacgaggtcaggagatggagaccatcctggccaacatgatgaaacccgtcgctactaaaatacaaaaaatgagccgggcatggtggtgtgtgcctgtaatcccagctacgtgggagactgaggcaggggaattgcttgaacccaggaggcagaggttgcagtgagctgagatcgcgccactgcactccaacctagagaaagagcaagactccgtctcaaaacaaaaacaaaaacagactgcaggccagatttggtctacagatggtagtttgccaactgcacctctcatggaatgaaaatcacctgcctgacatttttattcttgttatctcattatgtctacagagcttagatgtcatacagaattgagagcaaagaacaataattccggcccggcgcggtggctcatgcctgtaatcccagcactttgggaggctgaggtgggcagatcacgagatcaggagatcgagaccatcctggctaacacggtgaaaccccatctctactaaaaatacaaaaaattagccgggcgtggtggcgggcacctgtagtcccagctacttgggaggctgaggcaggagaatggcgtgaacccaggaggcggagcttgcagtgagccgagctccagcctgggcaacagagtgagactccatctcaaaagaaaaaaaaaaaagaacaataattcccaaacctggtcactgctgcagtcacctctgttgcagaaaacgcacagttgatttcttactatatacagcaaatattgatttgataaaggaatacatttctgaaaatgaaatctaaaagctgatggagcaggtcatttataaaagccagctgccttttaaataagttattacagtacattgccagggtgagcccatgttgacctgagaagattagcacatccatcaaaggctggtgaaaagatttagtattgacatgtttctctctaagaacagttggcttcacattcagcccctgccctgagacaaatgcattattttcatcagccctgggtgcttatttttctaagctctcattttattactggagtcacaatttgtgtgtaggtgttgccgacaaaaatgataattaactttcccttgaggtgacacataactaaaatttcaaatctttagtatttctccctttcattttaaattcatatgcctaactataaaataactgtgactgagatacaagtacaaaccaaagcctggaattgcagcaggtgctgaggcatttgaaagtgaaatgtttctcttcgcaaaggactcttataccctcccctaaagaaatcaccatgccggtctcacccctactggctttgttacctaaggcttcacctctcagtgcttctggttccttccttatccttaaaatgagtgttaataattctctcgtggggtcattgtgcggaccacattgagtagtgcctgtaaaacagtgctggctacacggtaaatactcaataaatgttgacacgttt

SEQ ID NO: 17169 - DNA, 160 bp, Homo sapiens
ttataatttcaatttgatcatattttaaaatatgttttcaccaccatataagattttggttctacttgctatatgcctcctttgtaaaaataaacaccgaggcttactgtagtagaaactttagttttgatgatgcacaaaataaacagcagtggttctc

SEQ ID NO: 17170 - DNA, 644 bp, Homo sapiens
ggcccccttctttgatgcagttatgccgccttagaattcggaagtgttttggaatccagcagcatcataagataaccaaactcgtcctcccagaggatctgaaacagtttctcctacatctttaaatgcatctagggaatggattcacaaacgatgtgaaaacattattgagtgttgtagccactagaattttaaaatcaagttggatttatagagtttgactagttttttcgattagatttgtatttgttataaacttgtttatggagtttgactaattttttctattcaatttgtatttgttaaactcaagccagggttgaaagacactgcatacgtttgtattattagttagaaggcatgaagacttttttccctgcatggagagtgtcataagttattgttttgcatatctactgcatgccaagcactttctgcatcatctaatttagccctcacagccactgggtcaagatgtccaattttccagagtaaggatagaggagtcaaattcaaatacaggttttctgacattaacttatgtgatgacttgatcgaggcaggcttttccagcatcactgtcctggttccatctctgctatatgggaatgaaaataaagaaacatatttcttggcttgtctaa

SEQ ID NO: 17171 - DNA, 2048 bp, Homo sapiens
aaggaagcctagattgtaagattttaaacatttgtaatagttctataaagactatggaaaataaccttgcttttggggggtttttgtttttttagagttaatttagtaagttatgctacctctatatcattcaatattttctgttgaggaaagataaaaatgtatgcaattcctgagtgtagaaacttcttgcacttatttaaaatttaggagagaacatttaagccactcaggtatgcaatttttcagactactgaaatccctgtagcagagatgttttaacattatattttgagagctttgggtgctgaagggccaaacgttttctgggcattttttggccagtttttaatgtaacaccattagacactcaccagatgtttacaagttttctttaggggaactacaacaattatatgaactgttttatatcatgttcatatacatttattaggaatctaaatcatgtctttgaacatttattaggttcactcagtaggtgttacatgtaattaacaggttccttgagtaagatagtccatcagttaccagcacattttgaacccctgctctgtgtagaatgttgaactagatgcttcccgccattaaggaccaggggtgcattcactctttgtttaccattcaaatggcttacttcatcataattgtggttgatatgagatcaatatccaacatgccaaaaatgctcatgccagttaatgccaggaaaaaaatcaccgacacactactagtactttgttcctgttgtatgcattctcctaggtagagcctccatcttcagttgtgtttgtgaaggtattttttgctttttaaatactggggaccgatatcactgttgatagtgcagagaaaccctccacatttttcagtgcataattgagttttctataaatgccttcgtgttttctgagcagaatgtacgaggtgtgccatcccaaaaccagctgctaccctgtccttttaatgtaagtcactccccttcactgtggcctcgctgatgtctgataagtattgtcagtgtgcaaaaggctttacttcagaatggtttatttatagcaaactaagttgaaaattttagaaacagtctttgtgggtggatgttattaactgtcattgttgttgcccagagccatgggttttttaaccccaaattatccacatggtgtgtattatgaattctttgaactcttaaggtttttgtgagaaaaggactgtgaattcaaaacaataaggcacttgtgggtgcactacatagattctgacagtgttgtgattctgtataggatttttaaaaatgacaacattcacaaaatttattactttttaaaaaataacatgcctattaactggttgcactgatataaaagaaatatatttgtgttttgtttgtactaaaatgcaaaagcaagagtgcaatttttaaaatctagaagttaggggttttgttggagaaaaatggactgatctttaaactattcagtcttactgggatttttatgcatagaaactcacatataaacatgaaataaacagtgccagtattcataggaaagtgagaaactgtaatatttggccattattctattcaacaggttttagaggcatgccaccattttttccttatatttttgcttaatttttttaaattgtcatttaattcttaaactgtcatttatttgagatggaaataagatctaaagttagttgcctttgcctgtaaaacatgtgatttgcaaattattatttttcttttttttaacaaatggaagtaaatttgtttcacgtaaatcttaattttcaacctttctggataccttaattgtaactgtcagtttgcactggtcggtatatggaaacacattgctctaccctgctacttagttgattttaaagtgaatttacagtgatgagaaatttgtgaaaaatatattgtatttcttttgatgtttcaaaaggttgcctatgaaaaactgatttgttaaaacatgctacatgtccaaaaataaagaccagaatgacattttgat

SEQ ID NO: 17172 - DNA, 536 bp, Homo sapiens
ttcagcgttccaagttccccatccctgtcatttttaacagcatgctgctttgccaagttgctgtcactgtttttttcccaggtgttaaaaaaaaaatccattttacacagcaccacagtgaatccagaccaaccttccattcacaccagctaaggagtccctggttcattgatggatgtcttctagctgcagatgcctctgcgcaccaaggaatggagaggaggggacccatgtaatccttttgtttagttttgtttttgttttttggtgaatgagaaaggtgtgctggtcatggaatggcaggtgtcatatgactgattactcagagcagatgaggaaaactgtagtctctgagtcctttgctaatcgcaactcttgtgaattattctgattcttttttatgcagaatttgattcgtatgatcagtactgactttctgattactgtccagcttatagtcttccagtttaatgaactaccatctgatgtttcatatttaagtgtatttaaagaaaataaacaccattattcaagcc

SEQ ID NO: 17173 - DNA, 200 bp, Homo sapiens
tggaaagcggaagagcaggtcttgatgtgtcctagaattttgccatttctgagattgagccattgaaggcattccatttctaaagcttatttagccggtgcttctaaagaattccacactaacgtgataacatggtttttgtaacaataaatgtaggatatttcctggcacatgcaaataaacctaatcattgtttcttt

SEQ ID NO: 17174 - DNA, 872 bp, Homo sapiens
aaaaatctatgtttttcctcttgaggtgattttgttgtatgtaaatgttaatttcatggtatagaaaatataagatgataaagatatcattaaatgtcaaaactatgactctgttcagaaaaaaaattgtccaaagacaacatggccaaggagagagcatcttcattgacattgctttcagtatttatttctgtctctggatttgacttctgttctgtttcttaataaggattttgtattagagtatattagggaaagtgtgtatttggtctcacaggctgttcagggataatctaaatgtaaatgtctgttgaatttctgaagttgaaaacaaggatatatcattggagcaagtgttggatcttgtatggaatatggatggatcacttgtaaggacagtgcctgggaactggtgtagctgcaaggattgagaatggcatgcattagctcactttcatttaatccattgtcaaggatgacatgctttcttcacagtaactcagttcaagtactatggtgatttgcctacagtgatgtttggaatcgatcatgctttcttcaaggtgacaggtctaaagagagaagaatccagggaacaggtagaggacattgctttttcacttccaaggtgcttgatcaacatctccctgacaacacaaaactagagccaggggcctccgtgaactcccagagcatgcctgatagaaactcatttctactgttctctaactgtggagtgaatggaaattccaactgtatgttcaccctctgaagtgggtacccagtctcttaaatcttttgtatttgctcacagtgtttgagcagtgctgagcacaaagcagacactcaataaatgctagatttacacactc

SEQ ID NO: 17175 - DNA, 643 bp, Homo sapiens
agggctgttgttctgcttcctcaagaaattaaacatttgtttctgtgtgactgctgagcatcctgaaataccaagagcagatcatatattttgtttcaccattcttcttttgtaataaattttgaatgtgcttgaaagtgaaaagcaatcaattatacccaccaacaccactgaaatcataagctattcacgactcaaaatattctaaaatatttttctgacagtatagtgtataaatgtggtcatgtggtatttgtagttattgatttaagcatttttagaaataagatcaggcatatgtatatattttcacacttcaaagacctaaggaaaaataaattttccagtggagaatacatataatatggtgtagaaatcattgaaaatggatcctttttgacgatcacttatatcactctgtatatgactaagtaaacaaaagtgagaagtaattattgtaaatggatggataaaaatggaattactcatatacagggtggaattttatcctgttatcacaccaacagttgattatatattttctgaatatcagcccctaataggacaattctatttgttgaccatttctacaatttgtaaaagtccaatctgtgctaacttaataaagtaataatcatctctt

SEQ ID NO: 17176 - DNA, 1518 bp, Homo sapiens
ctctcctcccttgttgatgacttcttgtggcatttcacacactgtagatggtcactcccttcatgtccatgttagctcatggtgtaagatgatgtcttgtcagtattactgttttgctaagccgcttcattcatgcctacacaatttttttttaaaagggaactttagttaattaagtgataagggacttaaatatgaattagaatggtgcagaaagagataccttttctggatattttaaagtttaaaggtcagtttctcttaatctgattatgtgcacatatgaaaatggcacatcatatacatgtaaaatcaggcagtatacatttattaattactgtatttgacaaaggaaactcttaaattataatgtgaaacctggttttatgaaaccaaagactagtgcagcatttcagcatatgtaaaaaaaaaaaaaaagggaattgacatgtcacatatcaaatgaatggaaactttgttgaaactttaaaaagcaaatttactccaaagacttgtattggaaattacataccttttttttttttttttaaaggactacagattatttttaatgactaaattggagtgatacttcttacactaaaaattatttcttaggcattctgaatctgggatgagaaacaggattgtttcacaatagtaagcacataatttttaaggccaaggcacatttgactcctgagatgaattttttgtggtcataatcaaatacttagttgtttttgatgccccaaaataaagtgagaatggtaatttgccaggaattcttcataacagtatcttacaaaaaacgtgttgctctcttcacagtattatgtgtaaagtcattgtttaaagcacgaatgttccctctggggtacttgttaaagctaaatttattttgcttccctccacttagaagtgctgcacactttacagcagcttcctttctttccatggcactgcctagttaacagaagtcttataaaaatttaaaaagacacatttcttacaaaaaagagttgaatgaggtaaaatggcattagatggctctatattttttaaagctatgtaattgttcagcgtcacttttctaagtacttatacatatctaaacatgtcttcatggtttatattttcacttatatatgctgggctggattaagctttgttgtgattgtgaccaacattcaggccacgtgagcactgtcttatcacatcgccaattagttgtaataaacgttcaacgtacaaacactggagtgtgtttttatctctttccaaaagtttgtcaaactatgcagagctgctgaaggaagaatttctcatttttttttcagtaaaatgttgaaaattcccctccatttgaatatggtggttgttataagcacacacaagatacatggtggaagatctaaggagtcttcatgtacttcattaaaaaataacatggattccatactgagagcctatctacacatttattttcaatcaataaatgctgcttttaaaaccttg

SEQ ID NO: 17177 - DNA, 1777 bp, Homo sapiens
cctctgaaataattgaaggcaagatgaaggaactatctgaagaaatcactacactcttagagaatccctctgttctccagcaaacatgggatgtaaagcctcacagggaatctgataatacatacttctgtcaaccagaaccagaggggtagttttcttttccctccagaggcagcctttggtacttaaaatatctgtagctgattaaatttttcccaacaacctcactggggagaaagtgtgttcatgttttgtccagcggatcaggatgttaggatgacgagcaagagtccaggtcactgtgcctttgctgtgttgtatggaaaggatggcagggaacatgctgtaagtaattttgagtaagaaaatgagtcactgtgttacctggaactcagccacagatttgtgtgtggtccaagatcattgcagtttctcaccctgtttatttcctggtaaaagtaaaattgaataggtccaagacttgggggtggcaagtaaggctttgcctcaggcacaaaatttaagggggctccaaaaaactcaggaatcaagatcagcaatacagtctgagtatcccttatgtgaaatgcttggggctagaagtgttttgaatttcagattttggaatatttgcatatacatgcgatatcttggggatgagactcaagactaaacatgaaattcatttatgcttcatatacaccttatatacatagcctaaaggtaatttgatacaatattttaaataattttgtgcatgaaacaaagtttcgactgcattttgactgtgatttctggcatgagatcagttatggaattttccacttctagcgtcatgttggcattcagaaattttgaaattttggagcattttggattttcagattagggatgctcaacctgtatatatattttttaatcgacgtgaaattcacgtaacatagaattaaccattttgaagtgaacaatttggttgcattcactgatgttgagcaaccaccacctttaactatttccaaaacattttcatcactccaaaataaatgcctgtacacactagcagtcactccctatcttcccctccacctgtccgctggcaaccactgatctcctttttatttctgtggctttttctattctggatatttcatataagtggaattacacaatatatgtggtcttttgtgtctggcttcttctgagacagtaggaaggggggcttggctttggctcacccccactagagcattttttcatgcattcccactgatcacaaaacccatactactacctcattgacaccatacctgctaacctcgaggctttagtcatacaaagaaaatggcctttctgtattgttcttctgtgctctcataatgcttaaccatgtcttttacttaaacaattccaggaactggccttaggagatccaaatagggaaccaagattgcagagtgtcccatcttgggagggaatgctgaataattaattgatttacagccttgttgccgctggccagaccaccaggtggcccattactcgagatgatcatcacaaccagatgatgctaacctatatcctctacccttcgcgtgctttgtctgggaagtcttttggccccatgtcagtttctattgcattgagagcccaagagcccctggtcagtcaggcttccatttagcatggcgtttgcaaggtttacccatgttgtagcatgtgtcagaatttcattcctttctatggctgaataaaattccattgtatgaatataccacaa

SEQ ID NO: 17178 - DNA, 381 bp, Homo sapiens
acccaaagtacgagaaatgtttctgttgaatgtaatgctacatgaatgcttgatttatcaagcgccaaaaaggcattgtatagtaggaaatgtaagtggggtggcttatggcttctttatcctctgattctagcactttcaagtgagctgttgcgtactgtatcatattgtagctattagggaagagaagaatgttgcttaagaaagaacatcaccattgattttaaatacaagtagcagggtattgcctttgattcaactgttttaagtcctcattttctcaaactaagtgcttgctgttcccaaatatgcaagaataacttttacactttttccttccaacacttcttgattggctttgcagaaataaagttttaaaat

SEQ ID NO: 17179 - DNA, 367 bp, Homo sapiens
ataacggctttttaaaatttgtatgattataatatggggaaaggtgcattggttttataaaaaggcatttaaaacaaattatctttgttaattattttggggagtagttgggaaatggaaaggtgaattggctctagaggccctgtatgctagtatcattttcttttttaatttttgacttttcacaaatgagtaaataagagcaacctatttttcaagcagattgcacattttttgcagctttaatggaatattgggtgaattagaggggtaaaaaaagctattttcattgccacaaagtgctttgatgatgtaatacctaataaagggtaggatgaatatttcacaataaatgtttgtttgcact

SEQ ID NO: 17180 - DNA, 2078 bp, Homo sapiens
acggcagctgccaaactttttttttttttttaactgttaagactattttgtaagtttctcaagttctaattccaaaatcagcctgctgtactggcagagtagtttgcattgacacctgtagtaatcgccaaacctctttttctgctcataaaggaggtagaatcacattaggaagatacgtaatgtttcatctgtggatttgatgacaacctctgattgagggaatggtagtaaactcctcatgggcttgtgacccatggctttgacttagataattgacattaatatactttgtttttttgataaggtagagaaagaaattcaatagaaagtaaggagccactcagtcaaataatataattcgtataaaacttgacaagtctttttatttttgtgacttgtgagatagtttaagatatttttatgtgaccaatttgtagaatgaatacatattttcaaagttatcttttcaaaattcaacttttagagtattttagcaaaatatatgtatagtttataatatagaagtatagctttataaagatattaaggatttattttttaaaataattctctgaatagtttgctgtagtagttgccttcagcttaataaaaccatagtacttctacatacatctttataagttaggctatgcctacaaaggtcttaaaaagtagataatttaccgggtgtagtggctcacacctgtaatcccagcactttgggaggccgagacgggtggatcacctgaggtcaggggttcgagaccagcctggccaacatgacgaaaccccatctctactaaaaatacaaaaaaagtagccaggcatggtggcaagcacctgtagtcccagttactcgggtggctgaggcaggagaatcacttgaacctgggaggtggagactgcagtgagccgagattgtgccactgcactcgagcctgggtgacagagtgagactccgtctcgggaaaagaaaaaaaagaagtagataattaaaaaaatcttgcataaaaaaaaatcttccataaagggcaaaaaggctttaacttccattattcagatttaatccaactaagatagtctttggcttcattcactgttcagtttcacaagttttttacaactactagtaacagagctaatacagaatagtaatccacattataaacatagatcaaaataccacatcataccccataaatacatgcagttattatttgtcaattaaaaataaaatttttttaaaagaaaagtacagttcgaccctaggcaagaagaaatttcaaattgtatatgcatattttgaatttggtttatattttgtggtatctgaaatattccctggactagaagcaaaaccacagaaacaaaactttacatttagaaaaaaatttcaagacttctattgctaactttattacattagtggtttttagaagttatttagagcagtcttgtctgatagaactttccaccatgatggaaatgtaaataaatataccacattaaaaatataaatttgcaatgtccaataggctcgtatggctattgagcatttaagatgtaattaattagacagaggaagtaaatttaacattttctctcattttagctaattagaatttaaagtgaaatagccacaagtggatagtggctactgtgttggatggcacagttcaaaatgcctcttatttataaaaaaaagtgtttaaaagtggttcccatggcttgaagaggaataatatacacataacttctttaaaatcacattttgtttgagatggagatcttgctatattgcccaggcttatctggaactcctgggctcaagagggaggatcacatttgactggacaaaatacattttataaaggtgttttgtattttatgttaaagtggaattgtgtcttcaaaattgtgtcttcaaaatttcacaagttaatactattactgtattagtccaatgttaaacattttaaatgcctgctcataagactcatttttgataaataaatgtatctttaatgttttgtttcccaaatagatacaataaataaacatttaaaatgccttaa

SEQ ID NO: 17181 - DNA, 1937 bp, Homo sapiens
aaaaatgtgtaagtttagattggacataattctcaggtgtactgttaacattttaatttaaaagtatttctcttagcagtttttgttttgtagacagttcccataaaaatattttatcagaattgcagaactgtagtaacagttcagtcaactttgtttttttcctggagtcaccaaccagctttgggagacacagccgccactcccccagtctacttctttaaaaagcatttaacaggttagtattggcatattcaaattggcagttctttatgtctttttaaattttcattgtacagtttacaaatatacttaatgtagttaacagagaaaaacctttgattttggttaacctttatatctagaaccaaaacagctaaatcccaaaggggaaaatatcagggattgacaacttctataattaaatccatgagaatttttcctcactagagaatttaaaggtgcacctgtagatatcatcttttctcagatattttgtgtgatactctgtggtgttctgttcatgttctatcagtatatctagaaagggaatagccatataaattattttccttttattatttctctgtatgttgtatttgatcatatttaaaggaaaaaagcaagcttataagctttcatgaagtgttcttaccagtttttgataaattttttaaattataggatagaattgtcattttatgcaggagatatttatactacgagggttgtttggatggagtcagattaaattttttcagtgaaattcctattattttaaaactttccatattttcactacgcttggacatttaactaggcattcttttcttacatctctatatgaagatacctgtgtccaaaatttttgaagatatatattgtatgtgtttattcttcatatggtactttaccatatttatatattgttttatacctgtaggtttacacacaagtaaatcttttttttcttgaatttaatctggcactttgcactgccacagaggtgacgatgaactatgtatatagttagatgttttgatttcgtaaaaaatatatgtccatcgtttgctatcaccagtacctctcagcttactcttcaggggatatgaaacaatctgtagattggtttccatacagggaagttctctgtcctatgcaatgtttctaattaatttgcttagttctgagccatttattctgctacactttgaaagatatattagttctgacttattgtttggggctttattttatttttatttttttgagatggagtttcactcttgttgcccaggctggagtgcaatagctcgatctcggctcactgcaacctcgcctccctggttcaagcaattctcctgcctcagcgattacaggaatgcaccaccacgcccagctaattttgtagagatggggtttctccatgttggtcaggctggtctcaaactcctgacctcaggtgatccgcccacctcggccttgcaaaatgctgggattacaggcatgagccaccatgcccagccatgtttggggctttattttataagttagaactttgaagaggaaatggtgctatatgtttattgttattactttgtgtaactttgatgtaatgtttataagctatgagaatcagttataaaagtattagccatttgttgtaaatgccaataaaatattcaccaggggcaagaatgtacattttctttttagaaaaccaaatgtactttagacatgaatgcaactatttaaagaatagcttcatttatgttattccttacatgtcataagattcttacttaaacttggtcttctttcaagttgtttgtatgaagatgctgtacccacttgaacagtcctcaggtgtttacataaatactatgttttacagttttcatattttaaaatattaataaagttaatcgcaacgattc

SEQ ID NO: 17182 - DNA, 2315 bp, Homo sapiens
tgcctgcctcagctcggcgcctgccagggggtgactggcacagagcgggccgtaggggaccccctcacacaccaccgagatggacagggctatatttcgcaaagcaattgtaactgcagtgctgggtagataatttttttttttttaagatatagctttctgatttcaatgaaataaaaatgaacttattccccactcagggccagagaaagtcagaacaaagaaaatgtccccgaaacgaattttcttacaaaagcctaagtagcaggggtaattttctgctcattttttgtctcagtgatactgtgaaaggtgcagtctcaggggaacacaaagcagccctgataatttgaaaattcatttgctttaccacattcaagacagaaacatacagtttcctaaagcctggctttgaatgcagaagggagcagctcctcctagttaagtttccactaaatcatcgccaaagaggacttcagagccctggggaggcagctgagggtctcaagggtgactgggtggcagggatgagtgcggtgggtgagaatcccggtgccctgagaggctatacgtgacaaatgaccaaaagcccaaggtaggggagtttcctctgctcacagttcttaccttcaaggcggatctgggcttccaccctcatgaacacagggattggggagggaccagagcgcccaatacacacagctccattatgcaatccattccagcaaattccccgtgtctgtggtcaccatttaggtgatcatacaggacaggctgcacatctcagtatatgtagggaccccaaatgaccacaacacagtacaattgccctttacctagggctaccatttcctagcaaaccaaacatagttcgagaacagctggcccaggagctaccactggctactcagaggaggctcattagctggctacatgcttcgcaggaagtgggaaggactcacatcataaaaaggaccatgtagctttttccctgaaagcttctcaccctccaccctctgccttgcaatacgcaaactgcgcctgctcctgaaaagctctctgggaaggaatgggcctggctttccgttcctggaggcggcgccttagattgggaggcctcattggccacttagagcgcagcctgagtttccaggccccttcctgggagaggctgttaacacgggggaggggcaggagagggatatggagagcaggtggtggaatcagaggacgaggctgctctaaagactgttctggccccagacacagggtagtctttgctagcagctcatttccgagttacttttcattttcaaatgccaaggcaagtgactagactcgcgctaatacagtgctggacaacacattcaccttttctgtgaacaggcagccttctaaaagccccaaacatccttcttgatgctttgggggctcaattattttatatccaacccagcatctttctagtccctatgctgtatgcttgaacttcggaaaatgcttttccccgcccaatcttctctcaaatataaacacatcacacagggtgttgggggtggggggggggggtggggggacttatccctggccttaggacacaggacaaatctattttggatagaaatgcctgaacagagacccttatttggaaaggtgaattaactttggtcacgacatggactgtcagacaaaatggcagtatcctaagagttaaggcacatcaaacacaggagtcgagagagtgcagttcagggaaaaaggagaggaggaaacagtgaggcagggagaaaggctttccaaataagagttcatgttggaaacttttgtcacggctttattgagattaagttcacatacaatttgtatccatttaaagtgtacaatttgatgacttttggtatattcagagttgtgcaaccattatcactagatcaattttagaaagtttatcaccccaaagagaaatcctgcacccatcagccaacactccccaacccatcggccaccccaagccctctgcaaccacgaatcgactgtctctgtagattggccttctggacgttctacataaatgaaatcatatagtatgtggtatttcgtgactggcttctttcacttagcatagtgttttaaagttcatccacgttataacatgtgtatcactatgtcacttgtcactcctttttattgctgaacatcattgttcagtatcatgtcaagagcacattgttatttatccattcatccattgatggatatttgggtttccactctttagctattatgaataatgctgctatgaacatttgtgtata

SEQ ID NO: 17183 - DNA, 728 bp, Homo sapiens
ggtctcacctggaaacatgatcacactctcaatctgtcacgtgccccctagccttactgggaaccttctgtcccccaagatcccctgtgctatcaggaaagcatgtcccatcagaaacactctcggggggcaatggtagcactcaccctgaaactgatgtatgttaaagccacagagatagagctgaggagtcctgtgttcccccgcaaggagcaccccgggatcattttctaggttcatttctctggaacatttgctgtagcatctggtctcacggactctgaggaggaattggaaattggtctcttttgagtgcagagggaactgagacgccagcttaaattggctcttgcagagagttacagaaatagtttcgatgagctagtgacacatcctaaagatgcaaagatcctcctggcggcagtagccttgacaagggccacctcttcacaggatgcagtctgtctgtgcaccaaactcttcaccaaatagaacacttgtgtctctctgtggaatgggggttttcttgtgccttgcttgctttcatagccttccattttattggcatggctgccttgatgtaacataattctctgtccccaagatttagaaaattcctcttcgttcaccttggctcatggtcttccagggtttttatcctggctgtctatgaactagggttttctcctgccttaggaaaaatactgcatcttctggaatctagaaaa

SEQ ID NO: 17184 - DNA, 1557 bp, Homo sapiens
ttcctttcttctaaaatcaaagcatgatgcttgacagtgtgaaatgtccaattttaccttttacacaatgtgagatgtatgaaaatcaactcattttattctcggcaacatctggagaagcataagctaattaagggcgatgattattattacaagaagaaaccaagacattacaccatggtttttagacatttctgatttggtttcttatctttcattttataagaaggttggttttaaacaatacactaagaatgactcctataaagaaaacaaaaaaaggtagtgaactttcagctaccttttaaagaggctaagttatctttgataacatcatataaagcaactgttgacttcagcctgttggtgagtttagttgtgcatgcctttgttgtatataagctaaattctagtgacccatgtgtcaaaaatcttacttctacatttttttgtatttattttctactgtgtaaatgtattcctttgtagaatcatggttgttttgtctcacgtgataattcagaaaatccttgctcgttccgcaaatcctaaagctccttttggagatgatataggatgtgaaatacagaaacctcagtgaaatcaagaaataatgatcccagccagactgagaaaatgtaagcagacagtgccacagttagctcatacagtgcctttgagcaagttaggaaaagatgcccccactgggcagacacagccctatgggctcatggtttgacaaacagagtggagagaccatattttagccccactcaccctcttgggtgcacgacctgtacagccaaacacagcatccaatatgaatacccatcccctgaccgcatccccagtagtcagattatagaatctgcaccaagatgtttagctttataccttggccacagagagggatgaactgtcatccagaccatgtgtcaggaaaattgtgaacgtagatgaggtacatacactgccgcttctcaaatccccagagcctttaggaacaggagagtagactaggattccttctcttaaaaaggtacatatatatggaaaaaaatcatattgccgttctttaaaaggcaactgcatggtacattgttgattgttatgactggtacactctggcccagccagagctataattgttttttaaatgtgtcttgaagaatgcacagtgacaaggggagtagctattgggaacagggaactgtcctacactgctattgttgctacatgtatcgagccttgattgctcctagttatatacagggtctatcttgcttcctacctacatctgcttgagcagtgcctcaagtacatccttattaggaacatttcaaaccccttttagttaagtctttcactaaggttctcttgcatatatttcaagtgaatgttggatctcagactaaccatagtaataatacacatttctgtgagtgctgacttgtctttgcaatatttcttttctgatttatttaattttcttgtatttatatgttaaaatcaaaaatgttaaaatcaatgaaataaatttgcagttaagatctttaa

SEQ ID NO: 17185 - DNA, 693 bp, Homo sapiens
taccaatcagctaagctgtggcagagtgtcccaccacgctacatgttttgttaaagcttctgttagtgtatacacgaattccgctgtgtttacatatttaaaaatgccattgttcaattaatagtttaagaacttgttttaaatactgtcctgagtttcttttgaaacctgttatttataaacatagaactgtgtgtattgtgaaaacagtgagccttggttttgacctcccggaatattaggaaattcacttgtagtcccagctatgcaggaggctgaggtgggaggattgcttgagcccaggaggtgtggaggctgcagtgagccatgatcacaccactgcactccagcctgggcaacagagcccgaccctgtctcaaaaaaagtacacccttcagcacttgctggaatggtgaaacaaacaaggggtatttaacaaacatggaagctgggacactgcctcagaactggtatggtacttcaatttgagaaacacaaaactgatacgaatgtgccttgtagttaatgtttgatatgaacagaaaatagcttcatatttatactgaatgtgtaagtagagaaaactaagttatgtggcctttgaaatgattacaaaattggaatgattacaaaagtcttattttaaaatggaactgtcctcttgcctgataataaatattgtatcttgtagag

SEQ ID NO: 17186 - DNA, 1015 bp, Homo sapiens
atacttgatcaatgaaatgtcacattattcatcctgagtccgagactcaaattttctgccccagccaaaataatcttgtgccaaaagattaaaggtttgcctcaaaatgtccctgtttgaaagattagcacaaaagtcttgatagcacaacacaaattccatccaagaggagaatcttccccagggtttagtcctggggctggcactcgttgtgacttacacagagcaaaattgtgctaaaggcttttctactctgagatctcaatgcgaaatgaaaactcaggcagtttagtccatagtggtactattttgatgatattttccattaataaaatgtaatttcagattattcgtttacaagctttataattttatgattttttaatcgtgttttgtcacagacttccctagtgtttgtactacacgtagtcagaagcgagtgtccttttcttttgcttcaggctaagagctgcctcgctctttgtccccccattaggattctattacatatgcaattgtaggttcaacctgtccctttccctgccagcaaaccccaccaccctaagagaaattttagcttatatatgacggtatatttacaaaaagagaaagagaaaatctggtatttgcaatgatctgtgccttctttttaccaccctcttgattggagcttttgtgatgcagctaccatgattcaaaaaaattaaaaattaaaaaaaaaaaatctgccacttatccaagtccactagaggccactgtcttcaaagcttctctcaccctagccaaaggtcctaagaggagacagctgtgaagttgggcgtgctctgtggtaccagctgtgacttttctatttctcctagttttaggttgttcatgaaactagaaatgtcatcctgcttgatttttcatcagccaagttaaacccctgctttctgtcctttgcaccttttgcgtgaacagaatatgcattattaaagcaaaaataaataaaagtaaaatgcaaatgaaaacaagg

SEQ ID NO: 17187 - DNA, 1303 bp, Homo sapiens
tctgaaatcgtacaaatggaaatgacgctacaggaggatgtttgggagcatctctctctttttgtcaggagttagaagtgacactaaggcactaatactgtaacttcttgataaaataactttattttttagtagtggaatgctgcaacttttttacacctaacaattgcttttaaattacagtattcaatttaaaagttgtattaactacagtttcctttgcaaaaagtctcaaaagaatcacttgaagggcattatttgttgatgcatttttctctgagcatggtttcatagagagaacttcaccaagtaatattcagacgtttatatgttgaaagttttgcttacataataaaaacaaaaacaagtgtctgaattgtatagtgtctttacatgaaagaactttaaacagtggccttatggtagaaaattttataccagatttttctttttctgatgacattttggcttataactcgaagttttcttaagtttctgaagatcaaggcctatataattcatacatttcatattataagaaggcaagagacaaggtgcttcaaatattccatcaggtagttgtgagtgcactgaatttttagtaatatgttcattcagtttttttccacaactatttgctcttttccaatttcaaaatgctattgtggaaaatatgtaaagattttgtaatctatagtccatcttatttttccctcagggcaagcttgtgcatatcatatttttaaaggctttttaaaaatctgacaaacaaaatctcatatttgaaaattgtactttactactacagcattacacattttgcaagcacatcttatagagtgtttacttttagttcagttgatatgtattgcatacctactatgtgtaagagcaaatggatgggatttttaaatgaaatttttaggccccaataccttatttctttatgttttctgtgttctgcttaacagtacatatacattcccaattacatttttgtgaaatgtttatttgtaataaaataaaatgttgttgctctttctgcttaaataagttacttgccagtttgtgagagcattattttaattttgtttgagacttatagccttggatagcacctctgtttaaacagtgtttaaagcactgttctgtgcttacaaagacagagctttcaaaattaaaatgtgaaggttgataagaacttggtttttcatgactggatgtgaaaaatcttagtacattcagttttcttgtccatatctttaaaagagagggcagccttttccttaagtgagttcatgat

SEQ ID NO: 17188 - DNA, 1288 bp, Homo sapiens
gtgtttggagaacccgtaaagctgctgatagtcaaatccgagctactagctgcttgaagaagcttctgtcacccttaccgctggatcccaaattattagctcggaatgtaactgtattcctaggtagtatgtcaaacactggccactcttggtagaaaccttgaaactttcaccttgctgggctttagcaaagtttccttttacagttctgtttatgagcttcagctactgataaagcacttcctgaacttctctattatcatagtgaccctctgaataacctgagtgactggctcggcaattcgctttataaccattcttattcccaaagttggagcacataaacatttagatgtcttttcctgtaaaatattctagacatttacccaaactctagttcaacatatactcaacttgcactgtatatctccctgtcttttttgagacagagaagaaattcaggaggttccccatctccagagtttctctgttggaaagcagtatcaagaagcctttaaaaaattgttgttaagctttgccacctgcagaaatgcattgccccacattattcttctggggttaaagtagtaagtttggttgaggaaggaagtcaaaacagtcagtaatgatttctgttctcttatgcatattcgtgtatacatgggcaactgaatctagcaaggactctttcgtgtcacaccttaaaatcttcatgctgtagtcactccagaccatggagtggctttccagctgaatgaatcctatgtctcgcgtgcaggtggttggttttcaatgttcttgctaattttttttctattggatcttgggagttttctttgtttgctcctgtgtttgcccagctttaataaaaccaggcgcaaacaaaaaccatagcattctgaaacaatagggggcccacattggacccagtatgtcactttaatggacttcaagaaaaaatctgaatgggaaaaatgacactagaatgtatactccacacattttatgccatataatggtgtgttttcttaattttgtttcttgtggcgaaatgtggctttcaaattaaaatgaccttttcttctttgaaactttttgttttgacttgtataattaagggtttggaaagattcataattctgagagaggtttgcaaccaggagatacaaagaagtctcagtagtaatcttgttcatgtgcttttacagccagctacatttaagaatgtattagttacagaaattatatgtctgtgtatgtgtctctactcaataaagtacatgcctcc

SEQ ID NO: 17189 - DNA, 3787 bp, Homo sapiens
attgaactcaacattttacattccatcttttctgaagattgtcctacaatttggattttgatcatgacaaagaagattaaaatttcattagcatgaatgcaatttgttaaagcagactgatttgtttctaagatatttttggtttttttaaaactgataataatgctgaattatcttaagtgagatgttaagcccactttgttcttttaatgtaatggagcttatgggtagaagaccatgtctactaattacaaaaaaaaaaaaaaaccatgcattgctgcttttcctaccacttccagtaagaaaatgggtgttttgaagaaatcatttgccttgtcctcacggaatctgattaagccctggcctcttgattgtatagagtcattgtgtatattccagttacctagatattcccttgagattttgatacaatttgagggaggcagaagtctgcagttgaagaaaaaaaataagtctgtttgtcatatttaagtagcctgtggctatttttatactgattttgatatcatgttcttttcatagtcgtattttgccaccgtaaacataaaaaaaaaaaaaaagatttccaaaatgccgttttcagaacctgggttttaatagcagtattgaatttgtaagcttagtagttgcagaaattgaacactaggtggcactcagttatcttaacaggggaagtactgatacaattgttgacttttcttttactatgtgtaagaaataccccaaacatgaaaagattgttttgatcatatgcatgtatgtagaatatttttgcagagcagaaagattatgttagaagtgtgatttttattttcagaagtcatatacatgtaagctacaattttgagtgctttataaacacttaagatatatatataaattttaatttcatagcaacttgtaaaaaataaaatacttgttgaaaagcctttttcaacatatccctaagctaagggaagaggaaggaataacaactcagtgaaaagatggtctccagtttctgaatgaaaaagctacagctgagaaataaaataaaatgtcatgctgcagaatatgttatacccttattttgtgttaaggatatattttattatgtgaatggttttgtttttgttttttgtttttgttttttgcttgtattgggaattagctttactggtaacttccttatttagtttttagtggtcaactctaataaaatgaaactagggctgagctagttagccctcactagccaaactgaaactctatgcaacattaaaagaagagatccatcatgtagcttgtgacacttttattttattagtcaccggggaacttttcagtgatgaaaatacacagggtaataaaccttcacatggcttcaaaaggaaaacaagcaaatcttctctaatctactcttactataatttcctaagtgtacaccaaactctggatttaaaaatctgaagtactatagaacattaagttgaagaatggaaattaagagtacgtattcatggtttatatttcttattctatggagttcgtgaacacatctaggtggaatgcatctgagactaagggctggtttttaatcctcataagaaaccagccttgaagaattaacaattctcttcattggtattctaaacctcctaagatatttaggcttctgtacataaaagtgtttttgctaaatttacagtatatatagatcctttcatattattttactaagaatgtttgaactttgcatatttgatatagttcctggtaggaatagcacagctcaaacattagtttttctacttacctcctctaacacgtggtttgtctggagagtttctaaaaattcagctataaccccagttcatgtatttactggtgattgttcttgctgaggtagtaacagcccaatcttgggctgttaaatcctaggaaatctcgaatcatagtgattaaaatagttggggtaaagttgtagcttatatgcaatactacttggaggaattcttctactaatttgtatttaatgtggaaattgtatagtttcattgatttaatcataaataatggaaatggtctccaagaagttttatttttcatttttttgcttatacactctgattcctataatacagtgctataagctatgcacagaaaataaaatgtttgaaatccaagaataatggttcttactgctaagagggagtaatagttattactaatgattttgattgggttgcatttttgttgcaatgtttattccacttgcagttagaatatgaatatgttttatcactagtgtggctaaataaccaaacatttgtgtaaaaaaaaaaaaaagccaagatttcattgtttgttgaatatttcttaagcatctggcccctaaagagaccgcttcttaccaagcctgtaaactatgcatgatggaaattcttgtattttatttaggaatggctgttggtttactcaccacatctgtggaatcatggctataaatgtttgcttacaaactctttgtgacttgtaatttaacttaatctcatctaatgtaaatattagattatgatgttcagtaacatcttccataggtataaactgctgtcattattgatttcagagtaactctgagtaatcaaataggtaaaagcatgttttgagtaaaatagctagatttatactttacttgtatacagacttaacaacaaccggtattgactggattgacagctaaagtatcagaatgaaagcaaggtttttttgatgttacctgactgtcataaagatgaaaatgatttgtattggtatgaaatgcttatctttattctacttcgtaagggtaagttttatttatactctttggactcccatgaacttttgcacactgctttgtgtttttggtttaccctaaactaccatcctttttatctttgctttttttcttcctattcagaaaagagcaaaatgtgaaaagacacaagactctcaggtatagaatgaactgagcaatttggagaatgtattggactttgtcctctcttattcccccctcctagccctgcaagttgctaggtacttgtgaggcagtgtactggagaggggagagcatggatcctggggtcaaagggcctttgcccccacccttacttggccctctacctgcaggtgaccactggcacattctcctgcttgtctcagcttcaggttcttcacctctaagatggggatgatgaaaacagtacctgtcatgcagaattgttgggaggattgataatttagatgtttatacatgtaatgtacttagatcagtgtctgctcttttcacttgatatccagtactatgtaagatagaaggtgcatgtcttctgtattctgtatttcccatttcttttgcgtgcagtctttgattcgtacaatagaaggaacacgtagaatgtatatttgtacattcatgtcaacatagtatttgaaattgctaccaaactcatttaatttggcataagactaacagatgaagtctctcatttgcttgaagatattttacaaaataccaactgttctatatttctttagaaaaagattatagttattaatattgatacctctgataatattttattcttaaatcttcagtgattccttttactatagattcatgacagctaattagtactaactgatttagaggtttcctttcccatcatatggaatgatgtaaagaaatcagatacaaactactgcaattagaaaataaaatatgaacaactttcaacaatgt

SEQ ID NO: 17190 - DNA, 5486 bp, Homo sapiens
agtgacctcagtgagatatttggtaccatggtgtaagctgatagcacaagttctggcgacaggtagcacgtatctgagagacacctgcaagcacacactgtcccagctggtacccataatgctgctgttcctgctgctgctcctgctttcctctcttctcgctttaaatgattgttagcaagttagattttcctggagcttcggaagaaatgaaaatggaaacatgatgaagatatagtcactgaatcaatgagaaaaataatgaacatatgaataccacctaaaaatacactgaataaagtacaccatatagcattatttttataggaaatatttcatgtcccttaaatattctttgttagttatagggatggacagtttatgttaagcacttagcttaaacaatccgtttatattagcactgtatcccttgtgccatccaacattttgtatgtttttgtaaacagttcatatacagtacatttctgtactgctttctttaatgtatacatgccttgtttaacttggaatctattattattaatcaattgactattaaatctggttaaatagttcacctggattaacagtattgttggacagtcctaaaaatggccagattgtggaacagctgttgaatgtaatacttccaaaatgtacatatctttccccacgtctgtttcactggttcgttcatttgtttgtttcttaaagtcaggtgctctgtcagactaacctagagagctgttatggtagagaaagttatcatatgtgtgtggcatgaaatcaagaatacacctatgaagttagtccatatactttgcaactccttagagtacttttttccttaattaaggaagtagtccttgcacttctaatcttacatagcatccatacttagaatttggcatatcatctgggattttgccaatatacgtcaaagccctttaagagtcatggtaaggagatgggtgaaggaaaatttagcaacaggtaattgaagtcctattggatatttcatgtttaaatagatattctatattaaacactaatttaaatgtaataaaggccaaaggcctctgtatgaaattggatttaaactttcttattttagggaataaaacattattgatcaaacagtatctgttctaacctaaaattataggtagggcaggctaagtgaacagcattgagtattttctgaatccctcatgataatttatagccacatactgcttcctttgacttcaggaatgatcagttttcataatggccactgggcctgcttagattgcagtattcattatctgcatctaatttggtagtttccacaatcgtatttgatgaaagaaacttcagtccccattattacctgtgtctttgccaagctgcctagcatacatcagtatgtaatgtaaaagacatatgagcaagaaaaaagtgatttaacttacctcatcaagaatgtgcccctacaggccgggcgcagtggctcacgcctgtaatcccagcattttgggaggccgaggcaggtggatcacctgaggtcaggagtttgagaccagcctggccaacatggtgaaaccccgtctctactaaaaaatacaaaaattagctgggcatggtggcgtgcacctgtaatcctagctactcaggaggctgaggcaggagaatcgcttgaacctgggaggtggtggttgcagtgagccaagatcacaccattgcactccagcctgggtgacagagtgagactctgtctcaagaaggaaaaaaaaaaaaaagaatgtactcatacagatttttgttagtcatcatgtaataagccatttatatcagaaaccttttttcctgccacagaagctttaaattttcccctaagagtacaaagccaagagagtgtggtttatctaaatgtcctgaaatccacttgtcattccttaatttctcctctatgcaattaaagagaaaggggaaatctataacatttcttttgcccaagtgacacaaaaatgattactgcatagaaatcaaatgtaagtttagcttctaaatgaaataatatataggagggatatcagaatgtctagatagagaaagtattttcaaattcttgaatatatggatgctattaaaagctgctttccattgcctggaaagagagcttttttccctcctctattcagtgtttcaaactttggtcatctcaaattattgtcacttttaaaatgttaatgtcattctgagcagaaatagatatattttcagatttttttacactgatgctactccgtaattgcttaggagtattgtccatcatagtattttagaactagaagtaaacacataaatccttataaattacccaatccaactttctcatattgcatgtagagaacctgagacacatatcaaagtctagaatccttaacttctccccattttgtttttttccgcctcatcacaccatgctgcctttccctcatatgatcaccaaccagtagctgagttcaaaaactacatatttcttgggcagtcctctactggtatgtgatgccaacttttatttctttcgaagataattgccttctttgcctagccaagcagccaattttattggagaaaagcaagttatatgttcacaaaatggaaggctttctacctaaatttatttcatctgtggtcctcttattctcttccattgcttttgacatacagtggaaaaacttggccaacgatgtgctctaaatatagtgcttgtgttgggttaacttttccattaatttctcaacatcaattattcaggcccctacagttgtggtattgaggcccctaaaggcttctgcctttcaccaattagtgctgccagttactgaggcttctcccaaaaggtatcagtccagtcttaaagatatttcattgtgaaagaagaaactaaactatcaggcctcttttacaaaatgagagattgaatttaagcttgtcaagcacgtactggaaggtatgaattacactaccatgtgttttgtatcttccctttcaagtgatgatgttaaatgaaggtaagtttttcatccttttttaatttttgttttttataaatcatttcagctttttctggtttatagaggtgtcttatttctaatgcaacagacccccaactttaacagatttgatatggatgcatttattcacaagcaaccccaaaagtccaaaaatgtaataattttgacaaggcccaaagttgagatgctatgaagcttgtgtgtgtgaaaagtcagttatgattgtctggagagaagctgtggtgtgtatgctgtagagtttccacatttcacatgcagtgtactccaaaaagcgggtttgggtcaaccatttcccatctctttttaagaagtgactgctgttggggccaggggacatcatgggaggtggggctgtccagttagctgtgccctgcaccttcagcccaggaaagatttgaacagagcaaaggcttcaagagagggcagaatgtattcggcagaaaagggactcaggtaagcccagcctgggatgagagcagaaaagcattcaagatttgcaggccttgctatggatgcgcttaatcaccatggaggccagcaatacccatctcagcatggctttgatattctctacttcctggcctttaaaaatgacctataatttttcagtttgctttactatattttataaagaaaattctatcttatggttgattgagcattgagacttatgaaggcattaggatagatagctcaggaatgtaaaggttcagaaaaggtctgttttctcagattaacaaatatgatggattccatggctgaccttggtgcttaaaccaggaggtttcaatctagtcctagagttgtgtccctctgaaaggcccaatgccatgtaactaactttaaactggatatatactttgagccttacttaattcacagataagttgacttaactcagtatttttatttcaattaatgaaaacagtcctcttttcaaccccaggttgcttacattttgctggtctccccaagtgaccattggtggagaccaattaatgaaggaatgaaattcactttattgggactgtggtattcaacagagccacacttaaccactttttccaatgaagaatctccagaatgataatgcccaaatatggatggccaagaagaatttgtatctacggtgtgctttatgtgtttttgacactgctgtattctgtgtgatcaagtgatttgcagctggttccaatgtgactgagtgttctcaaagatttctagtaactaagtcaacttaattttcttaagcctggtattactatcagcctcacatttaccactttgattctagttttttaactgttcataacagggcataccgagggttgggatgagagcctacttcctacctcttaaggcactttcctcattattttgccatataatcttgaactgcatgataagctgtttaaatgtccatgacttctcccagagcaactagcaaagtatatgacattttgaatagagattagtggaaaggaaaatgtagagatttaagttcagaggtacaaacctcaataaaacctccttagagcacataccatgagtagagtatatgtaaacgtatatgagaagagagtcgctataatagtcctctctaagtagattagttcattgtctaatggaagtgaacatctttactcctgttatcaccatagtactgaatgaactgtataatgagtttttcaaacaagtatttaaaatagaactttcacgtacaaagcaagggcataaagattttggtttgtgtttctgtaagtgtagtttaccatctaaagctttggtttttaattttaaaaaaagcttcaaggtattgccattccttagcatccttattgattatgggtgatgagtttttaactcttaaaatcatatacgtgtattagtttatcttaactgttgccctaagcaaaagggaaggtatacacctaagggatgtacttattttgcatttttggtcatgggtgggaatggggtgggtgcctacttaaatagtttttaaaaaagaaaaaaatcacaaatatttttctactgttatatatgatcttcctttatactagtttctctctagtaaggcatgccagaagcccaagataccatatcatgaattcttacatattgtaccttttgttggtggttaaatcgcatcagatgcttggcattgctgccataattataaaatgcttgtaaaggatcaaatatcactaaatactttaaattgttttacttaagagtctaatctgggaagttttcaaatcatactattaatgtgtaatctaagctcttcagatgtatccatgaataatcctggaacaatattgcttgtattcctgtcatagaacaggttttgtaatctttaaaagaaatgaaaatttatataataaagtttcaaatcaatgc

SEQ ID NO: 17191 - DNA, 363 bp, Homo sapiens
atgggtcagtccggtttccttccgcaatggaggagaaagtcgcgcttggttagtcttacagagcaacggatgggctttttctaagaaagggattctgggagcagagtggcttctgaaggttaacaggcaaacaaggccttgagcaaagagaaacatttctccttgagctgagaatgggagacagcggggcggggggtcaaatagaaggctatatgaatcaacttcagtgagctggtgaaagaaaatttttagaaaggctcacgcaaggctagagaaggactttcacaaataaaatatgaccttattttccctcttacagttaaagtgtttccctaggtgcaaaacagtgattacttatgtgcc

SEQ ID NO: 17192 - DNA, 421 bp, Homo sapiens
gattgatgtgaagaaataaagaggcagaagatggattcaatagctcactaaaattttatatatttgtatgatgattgtgaacctcctgaatgcctgagactctagcagaaatggcctgtttgtacatttatatctcttccttctagttggctgtatttcttactttatcttcatttttggcacctcacagaacaaattagcccataaattcaacacctggagggtgtggttttgaggagggatatgattttatggagaatgatatggcaatgtgcctaacgattttgatgaaaagtttcccaagctacttcctacagtattttggtcaatatttggaatgcgttttagttcttcaccttttaaattatgtcactaaactttgtatgagttcaaataaatatttgactaaatgtaaaatgtg

SEQ ID NO: 17193 - DNA, 233 bp, Homo sapiens
gaacaccacatttgttgaaaactagcactctacccacagtgacgtggtatctgatgaagacctgatcgagtgtattgattttagtattgcttcgtgtcctccacacaggaggaggatgtattcagcctttaggatgatcagaaaagcagaaagagagagtggccggatggggctgaggggagaaagaattattaaacaataaatactttcaagacaattttaattgtgaacct

SEQ ID NO: 17194 - DNA, 249 bp, Homo sapiens
ttataggtaaacattggaaactccatagaataaatcagtatttctacagaaaaatggcatagaagtcagtattgaatgtattaaattggctttcttcttcaggaaaaactagaccagacctctgttatcttctgtgaaatcatcctacaagcaaactaacctggaatcccttcacctagagataatgtacaagccttagaactcctcattctcatgttgctatttatgtacctaattaaaacccaagtt

SEQ ID NO: 17195 - DNA, 75 bp, Homo sapiens
tgacatcctcctccctaaaaaaagaggcaaacaaagtatttgtttgcacagagtaattaattaaaacatataaag

SEQ ID NO: 17196 - DNA, 4205 bp, Homo sapiens
aggctgctgggaggcaagagccgcaccatgcaggatggggaggagggcgagagtcacagggttgcctgggtggtgtttgaagggtaatagtcacaggagctgcagctcagcagagagaccctgaactctgctaagggaaggtcttgggaccagttctctctcactctccgtacagctgaagagttgggcgaggtgcagagacttctagctggacaacctacacaaaccttagcgtctagagtcactctaaccttgctaaggaaggatgcagagttccctagagagacttgcactgatggggtgacttctgctttggtccttccaccacccccaccaagtaaaccacctgtggcagcggctgttccctcaacctgctacttctgcgtccataagggtcctgcacgttgcctcccaccaccccagctctgccagaataaaattgtttccaatagaggtggcaaagtgcttctgaaatagtcgagaaaaagacagattccaacctcctcagtccagccactgagacctgatgttggaacgcatcagctccttccagttccatgaatgtggctcatagacaaagccttgctttaggctggttataaaaggtcatctagtgtgaaccttaactttttattcaaaggacagttttgtcaagaactccacgtaaggcctgatgtgctcctggttgtactttctcatcactggtttgacttcattgttttgcagaaattaccttaatccgtgggaactgcaacaaagaaaaacttcctaatatataaaaaagaggagctgctttgctttgcctccaggtttagcggacaagaaatgtctcctgaagcttctccttaaaggatgctattatggaatggcttttcccatttctgaccagttaacagtttcatagacctcaagtaacagtttgaggtatcaaacatagtataccaatagggggtgctacctgcacgtatctgttctatatatgctccaatatgtcatccccgggtgtatcccatgtgcaatatgagtatatagtggtggcattttataatagaccccactcctgcgctccaccataatactcctctgaaatccttggtctcaagaaacatctgttctcttgtgacttgggcactttgtcaagcttattccagattcctgtggaaacgttttatcccaaccaggaaattagtattttgttctcgtggcctcctataacatttttgggtgaaggagaactcaagactttttacagagaactgtgggctcagttatgatctcagcatctgaatggtctaggtagtatcaccattatctctggccctaggtttgccaagtaggatgaagactctaagtgttcctgctgagttgtccaaaggtcctgctccttagtcacctgtgcgaaatgagcagggagagttaaggcatagaaccaaactctttgggttattgtatgggtatgccagtaaattcagacacagagctggggtctgactgaatagaggcccaaaccagcaacttgtaggcagagcccagaatctcttgtgatagaaataccccttttcagaggccttgggaaccagccttctaggtgacaaggggacaaccagtgaaggaaggcggcatgtctttccccttcttgttggggttgaactacctccctatccacttggagatgagtgctgtctgctgtgaagcaaaactatgaggctgagctggcttggaacctctttgttcttggcactttccttctccaggactctgggaagcactcatatgggacagagggctggcaggaacatggcatgtgaagaagaaaacttctttttgcagtcaagggccacccagaatattgctcttcagagagggacaagggcctcattcttccatttggtctctgtcttccatcatgcactcaggtcaagccatgcaagtctgcctaccatttgagttagttggcacttgtagcagtgaaggatgaggccagccaggcaagggaaggtggcgggaacaagggaagagaaaaggaggaaagaagttcctggagggaggaaaggaggataaagaaaatctgctctcataaaaccatttcaggacctcactttacaggtgagactctcttgggaaggcctttgtgcccctgctccatggcccagggcagatagattcacttttacctgaatcttatactctggagcaaatagtgtatcaggctgactatacatttgcaggccttacacgccatactgacaggtgccacttacgtgactcatcagataatgtcaccattgctgccaattatgggaaataactaatgcctattccagggatgagcccaaaccacacataaatgggttctaaatctcaccctcctaacctgcagtgagtccccccgttccaccctcttgaggctgcaaatctactgagaaggaatgggaaggattctacaacccaacttttgatactttttggccatctctcagtctctcccagcccctacccccacaccacctccctgctcccaggcagagaccgggttgcactttgttagggccagcaggtcaactgtaatggccaagagtgagttaaggctggaatgagaaatatgccccaagcttggaggggtaagcaggaataacacaaagcaaggaaagagattctttttgccctagtgaggaaaggaagcttcagaatgagggctggaggatagcaacttaggactgcagaagggggcagcttatgaagatgggagaaagtgggactgaagttgtaggggagcaggagggtagtgattttccgcttttctttctttctttcttttactttctttctctttctttctctctctctctctttctttttctttcttctttctctttttctttcctctttttctttctttctttttctttctctttcttccttctttctttcattcttctttgttctttcttctttctttctttttttttttttttgagatggagttttgctcttgttgctcaggctggagtgcaatggcacaatctcggctcactgcagcctccacctcccaggttcaaggggttcttctgcctcagcctcccaagtagctgggattacaggtgcctgccacgacacccagctaatttttgtatgtttagtagagacggggtttcaccatgttggccaggctggtctcaaattcctgacctcaggtgattctcccgcctcggcctcccaaagtgctgggattatgagcacgagccacggcgtccagccgattttccgctccctttcaagtgttaactcaccccctgacaggtgaagagggaagggttccttttacgcacaaccaaggttagcaaatgcccatgcaggatatggggtccctgcctctctggttgcttcatttcagcacttctatattagctgcttatggggaccctaaaatgaactggtcacccctccaccagctaagaaacaagggtgggattgctgtgccataagtcacactgaacgacttgcttctggcaagcatgctcctgtgtgtcaggaccttaccaaggcaaagaaatgccaggctcaagaggagcaggacgtgagacattggcctggcttctaacctggtctgagtggaagagacacagcttagggatttcagttttgctcttaggctactagatactgttatttcaccccctgagggagggacaggaagagcacggatttattttctctccgtcttcagtacttattttagcatctagtcataccccagggagagatgcgagacggtgtcactggctcagctgaagcagatgagcccgtctctagcagagatgtgcctgtttcttaggcatccgttcagcactagtcttggccatcagatttttaaaaaagaaatagctcatgaggcatttgcaacttctcctctctagacttctttctagttttcctctgttgtgtcactgcgatgtgtccagggacaaagccataagtagagcatacatacttaagactatgctgtacatataagacaagacctgtctgggttaaagcacgaccttatgcccaagcatttactctggtgctgaataacgcgaactactggaatcagcctcccccaactctgcgcgccccctgcccccctgctcctatcccattcttgctctcaaatggaccacaccattctcaactcgtttataaataaagggatgcagaattgc

SEQ ID NO: 17197 - DNA, 494 bp, Homo sapiens
aggctgccctccacacccgcgccccgcgcgcgccccgaaaggtcacctcactcagcaccactcaagaccaaatggaaacagaggaccagcacactcccgagacggcactgagagagcgcagccgccttcacagcagtctggatgcgggcatggcagccctcggcgctccgggacgtggcacctcctcggctggctgtccacccgcccctgcccctgcccctgctactgccaacctcgctccaactccaacatccactctctcttgttcttactttcctgaaaatatcggggaggttttctcccccagacgcctgatattgaagtaaaaaatttaaaaagcccaacctcttcctcctgacaccccacttagcctttcttttctttctttctttctttcttttttttttttaaatagcattttggcgctcgaagttgatctccccagcgagggccccagcgtgaagccagggcccgggaagcaaatgcgagcctgt

SEQ ID NO: 17198 - DNA, 1539 bp, Homo sapiens
aggcctcatatccagtccagctagatgccacctaagtacactggactttaaaattcagtttgactaatttagaattgtcaattgattaacagatttgctttttgtcttctgtttttgttaccccttatatgagtgcatacacaacttatttatgcctcttttcctttgttcccttataattgacctctaaaattgcataattttgttgaaaaaattaatggccttattagatgtatctactcatttcagacattctgaaagctattactttttagttttttcattttttaccaatttattttgaagataaagttcttcagttgagttgaaaatttcataaacgtgtttattctttagaggtaaaataaggcaaaccatagttctttgaatactgacacacacatacacacagtctcagaaaaggaaaagagaagtagtgtgtagattaattcctaacacttggccacacacacacacagcttcaaaagttgtagtaacaagagagaagaataagaaagtgggactgtatacaatctctatgaatcctgccaatatttaccaattcgcagtgggtggacatgatcggtttttaaggatttatgaccagaggagaattgatgagaaagaaaacaatggagtactcaagaaattcactcttcatcatctggttaattgtgattttccaacaaacatcacctgcattgtgtacagccacgatggcacagagctcctggccagctatgcacacacacatacacacagagccttagaaaaggaaaacaagaagtagtgtgtagatgaattcctaaccagataattcatctcctcagagcaaataacttgggattatccacattttctgaatcaatatgttaataatattgattaatttgagcacactgaagctggtaagaactaaattaaatttaatcacatgacattgtttactctatgcattaaatgttcttgaagttttatggttgggaactcccacaggattacattccaggaagtcctcctggcgcaagcatctcctataagataccagataggaatataaaaatctctcatatttgaaaacatttattttaattaacttttaagaataagttgcaataaaaattgtttatacttacacataaccatttgatacagttggtagaaaaatcctatttaacatccatgcattgcttaaaatttagctgttttatgagtttgttttgaaaattgttgcaataaaaattgtttatacttacaagtgatgtagttggtagaaaaatcctatttgacatccatgcattgcttaaaatttagctgttttatgagtttgttttaaaaattgttgcagtaaaaattgtttatacttacaagtgatgtagttggtagaaaaatcctatttgacatccatggattgcttaaagttctctcagctgtcctcgagtttaaattgttttaaaaattgtcttaagctttacttaatataaatttaagttactagatgttaaattactgttcaataaaaatattcatttttatttt

SEQ ID NO: 17199 - DNA, 110 bp, Homo sapiens
agtcatgtgggccacacaagtgcagtagtgcagttcaccatgagggaagaataaagagctgtgggcaaaagagtgtaaaatattttaaaataaactttcttaatattttt

SEQ ID NO: 17200 - DNA, 626 bp, Homo sapiens
agaggatgcttccattactgtctcgcatttacttaaacatgaagcaacactttatccatttattctgagaatgtgcaggaggggttagtgaaggggaattaagggctagagaagtaaagatcagctggaagtcatgtgtgaatcatggagaaatctcataatattacacttgatgaaggaatatggtaagaggagccataaggaatgatttcaaagagaggtgtgtacagcaaggaagcaaaaataaaaatgatcaaaaaagaaacggttaattcatttgaagaaacataggaattaaaaaagaagacagtcaaatgagatgaaacaaaaaggccaaaaggtggccgggtgtagtggctcacgcctgtaatcccagcatttcggaggctgatgtgggtggattacctgacgtcaggaattcgagaccggcctggccaatatggtgaaaccccatctctactaaaaatacaaaaaattagctggacatggtggtgggtacctgtaatcccagctactagggaggctgaggcaggagaatctcttgaacctgagaggcagaggttgcagtgagccgaggtcgctccattgcactccagcctgggcaacaagagtgagactcccgtctc

SEQ ID NO: 17201 - DNA, 3984 bp, Homo sapiens
attcagaaaagtctgcgccaggttgaaagtgaaactttgagcactaccagaagaaaaggaaacctcgggactctattcatccacccagccttttcattttcgattgcacagcggggaggaggaatggctttgtggtcgtcgttgtgctcacgaaaggaaaaatggggaggtcttttttttctcctttcttaactcactacagagtgagagatagaaagggatacttgaaactgggaaaggattcactctgtgaaagaatgtacacacagaagtcaagagctcttctgtggtggaatcccaattgttaaagttactgctgagtggcccttattttttaaagtagtactttgaatcatagtatgaaatgctacagtttatgcaaactgtgaattcccagagcagacttacctggtcaccgctctctggaaaaccaaggctccccgtgcttcttcccattgcttcctactaaagaggacaacaggaaaaagcacctagaatatttggggggggggggcaaattaattaagggtatttgtaattgctgcttttttcaggggtaatttccaacacacatacatgcacacaaacaaaatgttttaaaatgtgatttgtagcagtcaggaactaggcatatcatgcctttgtttaaaagtacaatcagaggtggtaagatgcctttggcttgtacagtgtgattcatcgagctctatcaacactggtaactaagacctacttatgccacataagagatgcatttttttaagttactgcatgtttttattaaggccattggttttcaaaataacaagtccttacaaagtatgattttataaatgatattctcgtaaaactgcgctttgccagtagcacagtgaatgtatgccaaatgcaagtccattccaaaatccatttggaaatcttgagctcagctgtggttcttaaacttttgcagtccatagggccttttttttttccttccaattttgtgataaattcatgatgtttacagcacagataaaactttgtgccataatcctaatttagctgaaatcaatattaactgttcaataaaaacttacttgcatatgttaacaaaccagtgtgaggggaattacagttggccaacgacaaagttgcacactgcattatttaggaaaggagggattgtcaaaaattattaagagaaaggtgaatatagaggactttgaaacaacttttaaaatttaacataactgtatctagaggtcaattgagtctctacaggcagttcagatcattttaaagcactccttatttatgaaatagaacttcagggtgcggataagagatataaagtcatgtgactcactagggtgcatcgctggaaacttaatagcacatttcattaaggtctctgccattgttggagttccttcttagctcagaattggagttttggaatcttcccctcattttggtgagtataaacagcaataaagttagtaggttctcccatcctaaaggattttacctgaggatatcgtcttaggaatatccatagacgctcccatcaggtttctcccccaacccccctacaccgcccccccacttctaatttagcagtaatctctggcagacctggaaaaacaagctgctcttaatagcataatgaaaccaaaggcgtaataactcatcatagttttccatcagaatcatttcacactctgcctacagctttgaaaacattttttcatatgtgaaaaactccccaaaatatatccactagtctcccaaaggaagcatggtaattaacactgataaaaacatctctcacacaacaactgtggcaaaactgtgaaaataacggtgagaaagcagatgggcttaaaagcatggtccccaaaacaacgttcttcaaaggtttttgtaacactggtctctgtctccaataacagtctagccgtcctactgttctgtaatatgcctttgcctttgtatggtttcatatctctttagtgatggtcaaccccacttggttttaagttacaatttaggggaaatatatatatatatactgcttggtgtcctagctaaaaggtttaccagtattcatagtgatatgctgaagtggaggcaattaacttggcagttgtcagttgagaatgaaagtagcatgtctgaaaacagtctgatgctttataaaaccatgtagatgactttaaaactattgcatgaaaatacatcaaggttaataagctgttatacagtagatgcatggtttcaatcctttggtgatattatctagtcaatcattgttttcacctgccaggaaaagagagaaaacagtctattggataggtgtaaagggtggggtatgcggtatcagattgattttaaggaagttttgtacatgttaatttttaattgtgcacaagtttcatatgccaacataggctgtattcagttttaaaataggcaaaatgacttgacactgataaatctggtatgtttaactgtgtcccatatgtagactgctttttgcctatgaccagtttgaacaagaattcacccaactttcaagatgccttttcaaaaggatcttgtagtcagttggtatgtacagacaattggcatggaagtggtaggatataaatcggatgacgcctggctgctgaggtgccagctggatcagctggtgcacttcttgtttcttgtaagaggtttctttaaaatgactagtttgatgtatctggtaacatataggcctgactatacattttacattatttcgctattttgtaaactgggattttagaaagcacgtttgccattttgttaaagtacattgccccttaaattttggagtagtttttaaaagtttaaaatggtaatagaggagccagaaactttttaagcattgtaaaatgttttgaattgatattgactttgtttggaagagagtagaggcagggggctttaaagaaacaaagaaatgcattgtaaaaatgtagttttagagcaaattaataatgatggtggggaaagtgttgctaatttgtttatttccctggaagaaatgggaagtgtgataagcagtttaatttttaaggagctggtctcaattttagtactttttaattatgcaaataaatcaatgtttccttaaattttgtcattgctttgtcacagttgtctagggttcatatccaaccttctgtggcaattcaattttatatagtcttttaagaggtaattgtaatgtatttctgacagtataaacaaaaagaatataaggcatagaagaattgtcctctaaaaatatcaatgatgtatcctggaatgtgaagatgtccctttatagttaaaaattgaattattttaatattgtaccattgttagaccttgaatgagtccatgttaccgtgtgtgtctgtatatctatctgtagagaaagaaaaatgacaactgaaatgttacttttaaaaatcagaataaattgggcactgtctgtgttgcaccactactgtatcttttcgaaagaattaacagtatttgcctattgtaaaggttaattctgatgacgttttcacattcaccagactttttttcctgtattatttgcatccccaaatatttaatacaagtagattctgcatggcttgggcattcagagattaatagaatgatgactcaattttaattctaaagccatgaaaagttactttgagactgaacaattctgaattatttatgatacccaatgtccatgtttctttccctactgtaaaagaattgatcagtttcttcattaaagcagcaaaaacttattaaatcttgtaaataccatgtctcttttagatttctgtgtatgctgtgaatgaaatcattttgagatgaaattgtacaaaggcattttaaaaggctctgcatgcatcgtacctccaaacagtacatattcggaaagtcaaagattcctgcaaaataaataaactaaaagcaaacact

SEQ ID NO: 17202 - DNA, 161 bp, Homo sapiens
gcccagatgggccccacagccacggggtcccttccctgggtcaggccactaggcggggcgtgcatgttgccctttcagaacgttctcttcagttttatctttcagttttaccattgttagcaaaaaagttatctggttctcaaagcaataaaggtgtccat

SEQ ID NO: 17203 - DNA, 2691 bp, Homo sapiens
gaagtcttttccacatggcagatgatttgggcagagcgatggagtccttagtatcagtcatgacagatgaagaaggagcagaataaatgttttacaactcctgattcccgcatggtttttataatattcatacaacaaagaggattagacagtaagagtttacaagaaataaatctatatttttgtgaagggtagtggtattatactgtagatttcagtagtttctaagtctgttattgttttgttaacaatggcaggttttacacgtctatgcaattgtacaaaaaagttataagaaaactacatgtaaaatcttgatagctaaataacttgccatttctttatatggaacgcattttgggttgtttaaaaatttataacagttataaagaaagattgtaaactaaagtgtgctttataaaaaaaagttgtttataaaaacccctaaaaacaaaacaaacacacacacacacacatacacacacacacacaaaactttgaggcagcgcattgttttgcatccttttggcgtgatatccatatgaaattcatggctttttctttttttgcatattaaagataagacttcctctaccaccacaccaaatgactactacacactgctcatttgagaactgtcagctgagtggggcaggcttgagttttcatttcatatatctatatgtctataagtatataaatactatagttatatagataaagagatacgaatttctatagactgactttttccattttttaaatgttcatgtcacatcctaatagaaagaaattacttctagtcagtcatccaggcttacctgcttggtctagaatggatttttcccggagccggaagccaggaggaaactacaccacactaaaacattgtctacagctccagatgtttctcattttaaacaactttccactgacaacgaaagtaaagtaaagtattggatttttttaaagggaacatgtgaatgaatacacaggacttattatatcagagtgagtaatcggttggttggttgattgattgattgattgatacattcagcttcctgctgctagcaatgccacgatttagatttaatgatgcttcagtggaaatcaatcagaaggtattctgaccttgtgaacatcagaaggtattttttaactcccaagcagtagcaggacgatgatagggctggagggctatggattcccagcccatccctgtgaaggagtaggccactctttaagtgaaggattggatgattgttcataatacataaagttctctgtaattacaactaaattattatgccctcttctcacagtcaaaaggaactgggtggtttggtttttgttgcttttttagatttattgtcccatgtgggatgagtttttaaatgccacaagacataatttaaaataaataaactttgggaaaaggtgtaaaacagtagccccatcacatttgtgatactgacaggtatcaacccagaagcccatgaactgtgtttccatcctttgcatttctctgcgagtagttccacacaggtttgtaagtaagtaagaaagaaggcaaattgattcaaatgttacaaaaaaacccttcttggtggattagacaggttaaatatataaacaaacaaacaaaaattgctcaaaaaagaggagaaaagctcaagaggaaaagctaaggactggtaggaaaaagctttactctttcatgccattttatttctttttgatttttaaatcattcattcaatagataccaccgtgtgacctataattttgcaaatctgttacctctgacatcaagtgtaattagcttttggagagtgggctgacatcaagtgtaattagcttttggagagtgggttttgtccattattaataattaattaattaacatcaaacacggcttctcatgctatttctacctcactttggttttggggtgttcctgataattgtgcacacctgagttcacagcttcaccacttgtccattgcgttattttctttttcctttataattctttctttttccttcataattttcaaaagaaaacccaaagctctaaggtaacaaattaccaaattacatgaagatttggtttttgtcttgcatttttttcctttatgtgacgctggaccttttctttacccaaggatttttaaaactcagatttaaaacaaggggttactttacatcctactaagaagtttaagtaagtaagtttcattctaaaatcagaggtaaatagagtgcataaataattttgttttaatctttttgtttttcttttagacacattagctctggagtgagtctgtcataatatttgaacaaaaattgagagctttattgctgcattttaagcataattaatttggacattatttcgtgttgtgttctttataaccaccaagtattaaactgtaaatcataatgtaactgaagcataaacatcacatggcatgttttgtcattgttttcaggtactgagttcttacttgagtatcataatatattgtgttttaacaccaacactgtaacatttacgaattatttttttaaacttcagttttactgcattttcacaacatatcagacttcaccaaatatatgccttactattgtattatagtactgctttactgtgtatctcaataaagcacgcagttatgttac

SEQ ID NO: 17204 - DNA, 470 bp, Homo sapiens
gtagtagcaaaagcagaacacactcttgtttgatgtatatttgaactcctctcagctgaacaccctccttcactcccaaatgcaaacagtctcttctatttctttctttttatttacattagctgaaaagagaaaaataagctgatgtccagttgccactttcccacgtcacttgacaatttctttttccaaaagttaaactttatctcacagggggaaaaaaaaaaaaaaaccacaacacaatacagccactaattgccttacaagccttataagaaatatgggactgtttacaaatgagtgattccagtatttcattttgattttcctctctcacaaatcagtaaatgtgtgtctttttgtatctcattgtgtggtcatatctagtcacttgtttctactcaaaagaaaatatagtcacaggaaactacttcacagtaagtagtaatgattctcaagatcaaagggga

SEQ ID NO: 17205 - DNA, 145 bp, Homo sapiens
gcagttttcaatttactactcaattgggtatttcttgctctcattttaatcatcaatcataatttatgatgactggccccgtggatgcacaactttggcaacatctgtaaattcaatacctaatgtttatcaatatttcttaatg

SEQ ID NO: 17206 - DNA, 3247 bp, Homo sapiens
aaccaatagtctcaaagtaaaaacaaccaccaccatccaacaaaaggattacgtctgcatcttttctaacttactattttctaaaacacttgtggagcatcaagcagtttgctcagttgatttaatcttttttgccttttggctgtcaacatcataaccagcttttacatccattttagaaatctgcacaaattaagagagctgattagacataggcaaatgctgcaaacttccaatatgttcatatcgtttttcttgacaaatgaagggtctatatgacagcaaccattgtgagaaactagttggaatgagatttgcctcaatctcctattgcctgcaggggagcagttggcataagcaacatttagaagttcctttgcgctgacaaggattccactgttagagcccttaccgcctgcttatcctacccaatgactacattggctgttggttatttgcttgagtgagcccttgaaaaatgaactgcccttcagcatctaatgggagttgtgaatgtaactggttaatgatacacattccaccttcaggaacactctttttaatgggaggttatgctttggcaatcagcgtctccctgggaagagagtcaagacttggagacatgtgcttctcattatgtggttagaaattggtgcctcagccctatctagactggggaaaaattgaggatctctgtttttcctggggcaaacagaaagaaatctgcatgagttgcttttgtaccctttaaatcatttgccaaacattgcagcaaacaagtgtgcgtatgtaacaagcttcactgtttttatagaaggtgaaccattagtataaatggtaataagttgttccctaaccctccacatacatttgcctatcacacgtaaaattaatatttactctagtgaagtggtttgagcactaaccttgtacacattgttaagaggcttagattggtattcatacttatttaccatacaaaagtatggtaccttaaagcttttgctctatgttctttactgtttcactggaaagtgtcaatagagttgcctaagaataaaaattgaaatggtgttaatctgaaaattaatgattctctgtaagcactgtagttgaaaagagagtagcaattaggatgatcattttgtgtaaaattcattaaaatagaaggctgctattttttgcaagtattttaaatgtcttcatttttttaagaaaggaatagcgatagatttatataaatatctaaatgtctcagtagaggagtagaattcatctggttatcacctggtcctctgaagttaactgatgggctaaccgatttgtgcacacacttaggatggatttatgttaagggaattacttactgactgttcaatggaaggaagtattaataatagggaataagtttgcaactaatctcatgctgcaaacttgtgttaattctgtttaatatacaaatttggatagcttaattataaacatatttttatatcaaatatacagttctaatataaaagttataaataattatttttgttaacaaagacactaaaacagtatgttctggttttggccctcttgcagaaagaagcattagaaaaattactttaaaagtagctatatgttactgtattgcaaaatctgttaagagcaggaccacatcgatagtatttaataatttgttttacctcccaaaacacagttcttctttcagcttgtcttaagaatggttgccaaaaacaacagccaaaaaaaaaaaacctattttattatccaaatgctagaaaacacacatgaattttctataaaatcacgaatatgaagtaccaggtttagtcttactttagcaatgatagacaaaagcgaataaatacatcacagacagaaacctttataaaaatatatgattctataaagaatcattagaaattatgagtggaaattctccagaaagatagtattatagagtcttttgaagcaattttttgagaaatagtaaaatctggggcagagtgtcttgcagttaattgcatattgtcagagcagcatgagaaatatgatatttggatagggatttcagcaactaaacattctctgttctgagatctctttattcctgaataatgaaagaatagtactttggtgctgacaccaatgaggcacttctcttggtcctagtagaggatgcagtgtactgttaaaccaatatcatcacatctcgagtcttatcaagttttcattctctgtcaatatgacaagctcaaagtgacagaatatgttataggttgaagcacacatatttgcagtttactgaaaagtagatttcttatgtgacttttttcccttctcagcaaagagccctacactagatttctaccatcactaatatttggaagtatttcattactaacaatctcagtacaacatgaaaattgttgcttctcatctaaaatacaattttgtctatcagaataaacacaagtgaaattttcacctacattaacattatgtctttgcagctttaggtttgttagatgtgttcttaagcataatttttagccacaaacccattgttagatagatatctatggatatagatctacatctatagatatagatatacacacatatatatactcacacacatatagcataaaatactcagcagggctagttattccgatttcttgcacaattatttagctttttgtaagttcaacatgtaaattttaaagacataaatatagagagacttatgtgtttgaatataaatgatatatatggattagcatgtacctgtatattattaaacatgcaatgaactgactggtaagtgacgtctaattgtatggctagcaatgtaatttattcagactgtatttttgtacagagcagtgcactctaacctatgcctctgtgtcctctttaatgcctaaagctgtgcctagaaatttcatctgtcttaaaagtaaaatatacttcatgctgtttatgctattagtttctgtactgctattctatatttattatttttaaatatatgacatgtttactacttaaacatgaattcatggtatcctggttattttttttaagtcatctgggggaaaacctgtttatcactccagtgattttgagtttgcagtttcacaatcagttcttcatttcatgatttttgtagttgacatgaagtcatctatgtggaaaaaaataaaaataaaagtgatttcacggatgtggtttg

SEQ ID NO: 17207 - DNA, 1738 bp, Homo sapiens
ctgactaaaaatgttgggctaaagccattaacttaagaatttgtcagtgtatcctttccaaaaagagtaatagttgtttactagtgtgctagatgaaaagcgtgcaatatgctttaaagctatcaacaaaaactgaatattataagcaagcaatatcatagtaattggcagattagctcatattctatacagcatcgtttaaataggaaaaatttaatgctagcaaaaaataaatttagaaatatggcatgacatgaaaatacaatcttatatttacaccagcttttcactaatattttgtacctaaggtgatggggaactccattcagataataaaattctctttcagctagagaagttaacaggaataaatatatgaacaaaaaagctgcaaggataaatgtggagaaaatgatgagaattagctaacatttttaagtttttttaaactttcttcccctcagttgtacttaatatttagtggaaagtaataatttttttaattttctatcaactaatagtatagtaacaactatgattaacttgtttactttttctgaggattagtaaatcaattttttttaatttcaaatttttggatttacacttgagggtaaattaaatctggtaaactgaatttcctagttaaataaaattagttgcagtatatgatgaacagtgtatgactcaaacagctgccttacaattcactcattccatgtggaacaaacatttatcagatgcctattatgggcatatgtctctgctaagcaccatagttgtcaatgtgctgtgcaaatgctaagttccttttagcaattgttcagttggaagacgtattaatatttggggaaggaaaagaaagtagttgttttacaagggaggaaaaaagtgaatctggttacacatatggaagtaagcaaaatgaaaagcacttattgctttctgacagaattatagatgtaattttaagagttgctcctagcaagttaaaagtgcatataaaatatgcaactcttagttaaaggccttattatcagtcttacctatacaagtagtaaattttgtcattgctttagttacaaccatctgtaaataacttaaaagacttattatgtggggttcaaattgagtggaataaagtatagattaaaagtatacaatccttagcacgttatctcagggcttatgaaatgtaattaaatttattaagaaaatagatgaaaaattagggtacacagctggccaccaaatgcgaagtcaatctgctacttaaccctgaaaacaaaatcagttttgcatattaccactaacactaatacatatagagagcggaaccataactcattgaattttggagaggaataagcttagcgttaatattgacaatattaaggcaatattcttgtaggaatactatgtgcatgtttgatattttgccaaataacaataattaataattgttcaatgtttaagaataatattaacaaaataaaggagtttaatgcagtgatctttgtttttggcacatcaaaaattctcagtcattattcatgtttctttatgctgctggcttttgtgccctggaagatcataatagtgaccaaaatatacatgcagacttgttttttattattgttgtttaagcataatttaagaaaaaaaatttttacctggtgaacttgctatctgctctgtttctagttaaaatataataaatattatcttcctgtgctgt

SEQ ID NO: 17208 - DNA, 371 bp, Homo sapiens
catgatggttcctctcttggcaattcctcttcattgtctacatagtgacatgcacacgggaaagccttaaaaatatccttgatgtacagattttatttgtaattttaaaagtctattttattatgagctttctttgcacttaaaaattagcatgctgctttttgtacttggaagtgtttcaaaaaattatatgaccatatttactctttctaactttctttactccatcatggctgcttgattttgtagagaaattagaacccataaccatacacaggctatcaacatgttattcaatgtgacacctaactcttttctattttgttttttaagtaagacttttattaataaaacaaaatgttttggagcaa

SEQ ID NO: 17209 - DNA, 1091 bp, Homo sapiens
caaaccttaaatgtgacccgattatggccagtcagacaatttaaatgccttgcatataacgggcactcattacgtgttattaaattgattttatgtcaattattttatgtgtagtaaaaaaaaaagcaactgatgcagctgtgttaaggagccaaagacaataggaggcactggtaaattttggcctctctcaaactaaaattttcgtgtatttcccccccaaattataaaaacataactagaaaatattaaaaggtcatatcagattattaacattatatattcattaaaggcagctttaggaaacaggaatatactacaagagtgttttgtttgtgtatacaaatcattccatttttaaatggcacagatgcttaagggctataaaaacttctaatttcttataaatatgttagcactttttttaagttagtgattacagtttacctactgtatagaataattttctaataatggatggtattctaaaactcaattgaggcattcacattttaaagaaagtattgtctttcaccttttatgtgttctttttgcaaaaatctacaaagtgacagctgtgttcagagcttagatcccaaaaacgtgatctcttttagttactatctgggcagatggtagtatatctaatgaaatggtgattaatttaaatgtataatctggaaatatgtaaaacttgaagtattttttgtccaggcaaaggtactcattgggcctcagtttcttcatctctaaaatggagtggatgagatgatgtgataactgcagtcccttctaactcttaaattcttttcattctcacagattcactctatcattattgttattcatgtaagaaacgttttagggagaaaaattacactttaaaattaatttagttttctatacagttgttttctttactcttgaaaagttatgacagctttaacgtctcttgtcttctgtaattttttatttctaaactcctatcatttccaagctttaactgtactttatcagagccttcatttctggtatgtgttatatgccctcaatgtattcactgactgttctgtaatttcagtttgtctgtt

SEQ ID NO: 17210 - DNA, 455 bp, Homo sapiens
atatatatttatgttttcacagtcaccaagtgtattgtaatgtatacttgaaaaatgttataacttatgaagtaaagtttctgatagtagtctttaaaagatataagacttaatatgttttattcagcttctataagtgtgaccagttttgatatttatttatgctaatatttttaacaagtcatttcaaaatatgtgtatctcaaattctccctaaagtgttgtggccttaactgttcagtattgcaataaaaaatatatttttatatgtggaaaattgaaataagatatttcctagtttttactaaacaattttacttctttataattttataaggcaatatttgcaatcttacgacactgtaacagtttttgatgtatttacaatttttacaaaactgaggtaaaattgtttataatgaacatattttaataaactatatctggtcagttcc

SEQ ID NO: 17211 - DNA, 745 bp, Homo sapiens
gcaagctggacccaccatgtacagtgtgttatagtgttaatccttgtgcatatgtgtcataatacaactatttctgtaaagaaaggacactattacatatgaaaatatctcttctttatataagagaaattactccagtcagaaggacttagaaacatgtttttttccttttaaacttttaagtcagtttttatgaagttgttataatgtttctttacttttcaatgcacacatgctttgggatacgtttgtttttacttggaacatttgtttcttttcttttttaaggagaaaaaaaaatgagtaaaaggagctccacactttgacttaatttcatacaaagctctgatgacaggccatgactgtagagtggtcagaactgtgtggttggtttgagggagcgaattcggggaaggcacttggtgatataactttgttttgtttacagagtacctgctcgggccaggtaaatgctattggatgtaatccagtagtgtgtaatataaattcaaaccatatccacacacaacaactaattgtatgaaacttttatatcctaatttaaaagctgtgaaattagttttcacgcatcaaaccggattgtttatatgtttaaacattttatgctcttatttaaagaagactttgagctatttttttctgtaccctgtaaaatattgaaaactaacataatatgttgaggttgcttggaaatgtacataaaactaaaattttctgaatcgtg

SEQ ID NO: 17212 - DNA, 404 bp, Homo sapiens
atttcagttactttaccagttgtcagttttttaatgtgtaaacaggattgggggagtatggtagggcagggcaccaggcagatttggtgaatgaagcttgtggtaatttgaatatatgcaatgtggccagtaagagaacgtgagtggtagcactgaggcgtgtctggatgctttaagttattctgtagattataagggaactccactcaattgctgataaccgatgttttaattattgtgaagggtatctaaagactgcatgacgtttacctatcaattgctttgatttctctgcctgtaagatagcaaatatacctagaagtgctgcttagaatgccttacttgatacctggtagagatgtgtagcagccgcatgtctgtgggattcatgcaaatttttcacc

SEQ ID NO: 17213 - DNA, 366 bp, Homo sapiens
gttgcccgtcaacaaaaatcaggcatgttctgtgaaagtcagcatggcttccatctcagacatccttttctgtgcaaaaggaaaaagttaccagagtattgtacccaaacaaaaaggaatttttgttgttttgtcctggactttcctctaactctttggaactattttaatatttataaacttggggttgtataatctattgcaataaaaaatattagatactctatgccaaaacttgctaccaggccaggtgtgatggctcacacctgtaatccccagcactttgggaggccaaggcgggcggatcacctgaggtcaggagttcgagaccagcctggccaacatggcgaaaccccatctctactt

SEQ ID NO: 17214 - DNA, 2263 bp, Homo sapiens
acactattgtttttaaaccaggaaggctgacagatgagacaacaaaaaaaatctgaattcagccttcagtttaaaaaaggaaaaggactttttttttaaactttaagagctaaatattctaaactggcaaaaattttcagggtgcacttctttcatcaaaatgatcatccatcttttgtataatgaacttgtatagtgtgtttaaatgggacacatttcaaaggaaataaatcagtgtccgtttgccagtaataaatttaatattctgttttatactataaagttatgaaaatgccaaacttgtttatttaattgttttcttatgttttgggtgtaatagtccttttttggtttttgttttgttttttaaggcaggtctgtcatttttgaatactgtaaaactgtgataaactttatattgaagctgtattttaatatgaccgctttgaatccttacatgaaatgttctgggagttgttataaacacaccccaaggaagcaatatttaataaaactaggtcaaaaacaaaacaaaacagtgacactcacttgtgtgtatataaactctagagacatcttaggccctcccttcatctttaacctggtggatggagccagttattaatttataataatacatgtctgaaatttgaccaaaaacatcttctttatgtcaaggttaatatattttcttcagacattcctaacttgactagtggttaacatttagcaccttggttgtctttcaatatataggatttgggtgaaaaataaggaacttagtctttgagaagggacagtatgtggttcgtattgatcaaggatcccaaataatgcaatcattctcatctgttgaggatgtgggaacttttctgtcaggaaaatttagtttacagaatacttctgcatacaacattaattaggaaacaaagaactttaatgctgtacctctgcatgaagtttctgtgagctttctttatcttgcttaacttatcctcctttccttccccaccaaaattgggattgttctaaacaatttcaatttaattcattgtcaacaaaacgatagaatgttttgcttggaagaaacctggtccattcccctcattgtgaagaatcccgaatcctgggcctgtccagggtcaaatggagtttttggtattaatacatctctgcagggtttctttttggagcactgtgctgtctttcctagtcagtcagggacttttttaagcttcaaagaacatggtctgatgcaaaggtcttctaccgacttcatggtatttaggaaaaatttttaagtgataataccatgccgagttacctggtcactgtaatactggttctccattaaaatgtagatgctttgtctaattccacttcaagatgatttaattgagcttctataactatcaactatcaaattctagtttcaagtatctcactgtacctatatcatatctgttctcaactttgtttgattctccactcattttcaatcagagttgaagccttctttgcctttcttctttgtcttatttctgccttcatctcccacttctcacccaactctgccactgttcaggagcagttgactaaacttttatccttcctttaacttaatctttttatccttctgtttttagttcttacagtggtaatcacatcagtttggcaatctaagatgtctttatcaagggtcagcccttttctatttggagctgaatcttttctttcatgtagaaatctacatgtatatacaagaaatgtatttttatctgcaggataatattgtttcaaataattttattaagagttaactttttaggtattttcccttttaatgtggttttgaaatgttaattgcatttttacacatgatgcattcagtggacactcttttttcctaattataactcatctctgaatgcattgtgccaatcaagagtaagataggattcagtgcgcaaaatttgcttttgatgcttattaagagtaaacccatgaatttgaatttttatattatgcttggtacttggaattgatatataccttattaaagcttgaaaacatttagcatttgaatagtaagtttcatcacaaatcatgtcttttgcctcttttgttacccaggttcgatcaaggggactggatgcccaagtgattttctctaataatcgggttgggacttaactttaaggtgttttcaatgtgattttagtatttacagtaataaataaaatttatacaaagtttcagagaa

SEQ ID NO: 17215 - DNA, 329 bp, Homo sapiens
gcctctccccagatatctgagcataactgggagcacctcatttgtggaaaagcctctttgttatcggccttgtgtcagcaggtcatggtccctagagactacctagttgtagtgtgacctacatttataattattgtcatgtccgaatagataggaggagaaaaacaattacacactaatttaaagagacagtatcttttttaatcagttctcctaaactttaataaaatgtatctttaaatgtatgtattattcaatcctttggaatgttatatttttggaaatcatagctttttatttccaaggcccctaaaaactgcacaaaatag

SEQ ID NO: 17216 - DNA, 855 bp, Homo sapiens
agagagagggtgtctgtaatcacactctcttcttactgtatttgggatatgagtttggggaaagagttgcagtaaagttccatgaagacaaatagtgtggagtgaggcggggagcatgaagataaatccaactctgactgtaaaatacatggtatctctttctccgttgtggcccctgcttagtgtcccttacctggcttagcgttctgtttcaccagtttccaagtttattgccctcaaaatctttagaatagttaaattggcttgtttaaggttcttgctgccccacaacacaccttgcccatgcacaaggaatgaattttttcctaccattatggctttgtgcttgttcttcctcttacctgtaatagcctcaccttccctagttctttgcattcgtccttagaatactgtattgttacagctgaaagacagtaaagaccatttagtcctcaccttctgttttagagttgagcaaactgaagcccacagaggtggaacttaattacctaagagccacaataagccactggtatctgggggactagaacacaaatccaacgcttttcccacctctttggatgttttccccaattatcctccttcactccctgtcatagttaccgatggtgtcccgttgtgtgggtttactctgtgctaagttgtcttacacttctcaaatgctactcagtatatagccttaagtcttactgttttgtgcggtgtgtctccagctgattttaacttttttgatggtagaaattttatctcttcttccttttgtatcctccattgtatcttcatacaaaggacagtacacacttgggtaattaaaaataaaagttgattgaccat

SEQ ID NO: 17217 - DNA, 1019 bp, Homo sapiens
ggcccgctgctgtgtgtggcttctggatgggacaactgtagaggcagttcgaccagccagggaaagactggcaagaaaagagttaaggcaaaaaaggatgcaacaattctcccgggactctgcatattctagtaataaagactctacatgcttgttgacagagagagatactctgggaacttctttgcagttcccatctcctttctctggtacaatttcttttggttcattttcagattcaggcattttcccccttggctctcaatgctgtttgggtttccaacaattcagcattagtgggaaaaagtgggccctcatacacaagcgtgtcaggctgtcagtgtttggtgcacgctggggaagaatttactttggaaagtagaaaagcccagcttttcctgggacatcttctgttattgttgatgtttttttttaccttgtcattttggtctaaggttgccattgctgctaaaggttaccgatttcaaagtccagataccaagcatgtggatatgtttagctacgtttactcacagccagcgaactgacattaaaataactaacaaacagattcttttatgtgatgctggaactcttgacagctataattattattcagaaatgactttttgaaagtaaaagcagcataaagaatttgtcacaggaaggctgtctcagataaattatggtaaaattttgtaagggagcagacttttaaagacttgcacaaatacggatcctgcactgactctggaaaaggcatatatgtactagtggcatggagaatgcaccatactcatgcatgcaaattagacaaccaagtatgaatctatttgtgggtgtgctatagctttagccgtgtcacgggcatcattctctaatatccacttgtccatgtgaaacatgttgccaaaatggtggcctggcttgtcttctgaacgtttggttcaaatgtgttttggtcctggaggctcaaattttgagttattcccacgttttgaaataaaaagagtatattc

SEQ ID NO: 17218 - DNA, 913 bp, Homo sapiens
ccatgccagttttggtcaattctctatgatttacttctctcattttgccacatttactttagtagatataatttcattaaaaacaaaaaagaaacaaggtttatattaaatggaaatccataaaccacaattaatcctattttgtcatgttagttttacagaacatcatgttacattgccgacgtactgttactatttaaaatgccatcttaaaacatgttgaatatttttattatatgtatggtttattaataccaaaaaatcttctgataatttttgatccaacataatttgattcattactatatgaacagaaaatgacttttgaaggttatacatgacaatacaaaatcaaattatatcacagcaataagttgtgattctattaaacatttttgaaacctttttgacacgtttattacttacataattaagttttgtagcaacccacctcatcaaaataattcttaaacctctctagagtaaatatatttatcttttgaacttagtaaagctatgggaagaaaaagaacctccaacacacacacacacacacacacacacgcacgtgcacacacactggaaacatatgcagtatttatatttgtaatgcccttttttctatctaaagtcagcttgttagcttaggaatatatgcatgtgtgtataattatagtttgaccaaaactttattatgtctaaaatatttacaaatgtgaaagctgaagattttgagatttttgttttttttttggtttgttttacacacacatcccacgcgccccaccctagaggtttaaatattcagaaactacaacatttttcccctgcatttttctagttctatttttatttttcttcagcagaactcttgtcatgtagtgtacatttgattaaaacccatagccatgta

SEQ ID NO: 17219 - DNA, 539 bp, Homo sapiens
ggacatgaatattctcccataacggattcaactatgagaagagaagtggcagcaataaggcagtctctcaaaagtcatactgccagagtctctagggcaaggagaaacaactagctggacaatactcaattcacaacttagcattttgccatctgaagcttggcaaactagtatctgctgtaaaacaacctatatggtatgtgaaccgtagtattcctgagcaaaacgtggctttcatcgctttgtaaaaatttgcatctgtttagaaactagcctataaaatatcaccattggatgtagatatggagagaaaagaaatatgttgggtttattgcttagcgaaatattctctttttatttaaataaaatgttcttcattgtgttttatggtatgtgtccataatttaaaattcatgttatagtttcagtattaaggctgactttttttttttaagatatgtttgcaataagttaaaaaactgtaatacccttttgtggaaagctttagaaatgatataattattaaagatattaaacag

SEQ ID NO: 17220 - DNA, 1877 bp, Homo sapiens
caccagtgaaaaagcctggcatggagcccagcactgagaacttccagaaagtgttagccttctcccaactgtgttataccaaccacattttcaaatagtaatcattaaagaggcttctgcatcaaaccttcacatgcagctcccatgccaccctccagaattcaccaacacacaggcccaccagcaacaggctacctttgcacaatattctctgatgacaactccaaagccccggctctttccaccacactgtggtcccctagatggggctgttgctgagcccaccccaatccagatgtgatccccctgtgatctacttctggcaagattctcagtctggacaggtcttccctatgagatagaacctgataaggagctagggcaattctgacaacattaccaaaggcccacataacttctaaattttggtctggtctgaaggaaaacctgttcttgccctagtgatggatgaactctcttatctctggcttctagagggaaaaaaaagcatacctcttttactttttaagtacctccatcagagtcatgaaatcacctgtcaagactatctatcttttatgtttccattctggtaagaactctttaaatgaggacactgctgattgctggtgatgttttttgagcaaacactcgggggtatggatgaaagccaatcgcaggtcaaatgactccttggggaagctacttctcctctattcagatttcactaaaatcttccaagatgaaagcaaatctagatttcggtcttcattgctgtccatttttgtaatgaacgagtgtttttcctttagctagtgtatcaggcagggttctaccagagaaacagaaccagtaggagatacatatacatgtccagatttatttcaaagaattgatttacatgattgtggggattggcaagtccaaaatccatatggtaggcctgcaatctgtaaacctttgggcaggagctgatgctgtagtttgcagatagaattccttgttccttaaaaaaatctgtttttgttcttaagggctttgaatgattggatcaggcccacccagattacctagataatctcttttacttaaagtaaactgattgtaggtgctaatcacatctatgaaatgccttcacagcaacacctagattagcattcaattgaataactggggaatacagcctagccaagttgacacataaaattaaccatcacagcaacatgcctgctaaattttatcgaccgtcttcagactgttaaggattgtggtagagaactgtgacagccactctcagcatcaccctgaaccaaaggcccctatcaagtaacaatatagccaagcaaaattccagtcaatagagacattgactggttggctggcttcccaagggatagcaccagacaagaaatgcaaggatgaggaaaccaggcacgggagagagaggggcaacagaggtccagggtttggttatctttttatttttcactgggaggtggtaagttagccctgttgcccatgtatgcagatgggagaagtgatttagaaactccaaagcaattggtaatccccaaaatgggtgtatctggtttgaaatgaaaccttattttattggaaatggttggtttcccaattctgtttgccattggccaatataattgtgggtttgcacatggccagcacatgccaaacagaagtagacaaaggtctcactctgtaagtgggaccttggggaggagctgcctccatcataaagggaggggttagtaaaaatggtctcttaagcctgttcctgctacagttatagaggttgctcagaaccttctcagcaaatatagcagttatctattgttgtgtattaaaccatttcaacacat

SEQ ID NO: 17221 - DNA, 14 bp, Homo sapiens
ctttccccccaagc

SEQ ID NO: 17222 - DNA, 97 bp, Homo sapiens
ccagttgctaagtggggctcaagaagcaccgccttccccaccccctgcctgccattctgacctcttctcagagcacctaattaaaggggctgaaagt

SEQ ID NO: 17223 - DNA, 421 bp, Homo sapiens
gaaagtcttcacctggaaatcacaactgggtatgcatcaggtatctaatagcagggaggaggaaggcctgttgctgcaatcattgtacagggggaaatgggtatgagagactgaggcttgagtgaactgaaggcaaacagagccaagtatccttcagtccactggaaagacaagttcctgcatcaccacagtgtatatgcaattctatgcataggaagagcctttagagaaagcatttgagcgaaagtcatgtttggtgacatgattcatacagacctcttgagctcctggaaatagtagaattaagacctgaggagatgactcgtcatctcttatgcttcactttttggataaagaactttttaaattcagtactgattggttcagcatatcctgggacataaaaatactcactactggg

SEQ ID NO: 17224 - DNA, 1032 bp, Homo sapiens
ccaggacgaggtgaaagctgagaccatccgcagcctgaggaagtctttcgccagcctcttctccgactgataccccactctgagaaccccaaaatccctgggcaacccttctctgggccctgaatccatttctcacttttggagtctccaaatcccttgagaacccatctcccggttctccaagattccacctctcattcctcaagatccccgagtaccttgagaaacctgactcctcctggccctaaatccggttctcacatgtggaatccccaagtccttttagaaccccactcgtggtcacttcaggatctacttctgttttagaacctccacattcctgaagacctccgcccctggtttccccagagggcgttttccttcctggaagtgcccaaataccaggcaacccattgcagaatcccttcctggagccctgaagttcctggaaaaccctatttttggtcccaaatctctccagcacacctatttcccatcataattttccaaatcctcaagaaacccctactgttgagccccttcccatggatcttccatccctctgaagatccacatcttcaaatgccacccaacacctagccccacaaggatttcccttcaccagctcccctcaacctcattcaataccttgggagcccctcccacttccaggacccctcggttcccccagggaccccctccccagtttcctgcctctgacagctgtctttaaatatgcaaactccacccatcttcccagaatcctttgcacacggaaggccagtggtctccgcttccccacctttgctgtggtgtctgtgtctgtgactgacgtggcctccttttgtgccgtgcttggcatatgtggtcctcgttcatcgtgccgcctgtggtgatgcgtgcagtgacgctgtttatgtggtccgcacctccccctgaccttcactccttgcctggactcaccccacccctcagcggctctgaaccccaagagaagagtcgggaaacaaaataaacaagcaaaggcccagc

SEQ ID NO: 17225 - DNA, 46 bp, Homo sapiens
cacttctctcctccactctgagccccctgaccttccaaacctcaat

SEQ ID NO: 17226 - DNA, 1307 bp, Homo sapiens
ctactaccaccaccaccaccaccccttctggggtcactccatccatgctctctccagccagccatctcaaggagaaacatagttcaactgaaagactcatgctctgattgtggtggggtggggatccttgggaagaattactcccaagagtaactctcattatctcctccacagaaaacacacagcttccacaacttctctgttttctgtcagtcccccagtggccgcccttacacgtctcctacttcaatggtaggggcggtttatttatttattttttgaaggccactgggaggagcctgacctaaccttttagggtggttaggacatctcccccacctccccacttttttccccaagacaagacaatcgaggtctggcttgagaacgacctttctttctttatttctcagcctgcccttggggagatgagggagccctgtctgcgtttttggatgtgagtagaagagttagtttgttttgttttattattcctggccatactcaggggtccaggaagaatttgtaccatttaatgggttgggagtcttggccaaggaagaatcacacccttggaatagaaatttccacctccccaacctttctctcagacagcttatccttttcaaccaactttttggccagggaggaatgtcccttttgttcttccccctgagaagccattcctttgtctgccaacctccctggggtcctgcctgtttcctcccaatggagggtttttttggggggtggtccccgtctggggggcccctccagccagtactccaggtctccctgtctctcccccgctgccattttgatagtataatctatttttaaatggggcttttcaataggggagagggagtcatctcttcctatatttggtggggtgggtgggaaggaagggatttgggggggaatcttcctgccgcctcccccactccaagtgtttatttttgataccaaacatgaattttcagttccctccctcccagccccccaatttcctgcgggcgggtacaaaggaccctttcaatgtccctggagttgggagggaggaatgggggacataaagcctgtcctgtctctattctaggcaagagagagtgggttcaaaagactcctgggctcacctgttagcgctggcccagcccaggccttgggacctgggggttggtgatttgggggacagtgctacactcgtctccactgtttgttttacttccccaaaatggaccttttttttttctaaagagtcccagagaatggggaattgttcctgtaaatatatatttttcaaagtg

SEQ ID NO: 17227 - DNA, 45 bp, Homo sapiens
cttcttccccccatcctcagacattaaagagcctgaatgcctttg

SEQ ID NO: 17228 - DNA, 1315 bp, Homo sapiens
agagctaatcagcagtatctattatggacactgaaagaaagttgtgtcaattttactcacattttaaaagtatattttgacttgtggtttaaatatgggagtaaattcagcctttcttcttttcatctcagtcataacccaaaagctacgggagaaaaagcagaagtgtaatctctgtatctgacaaaattaggagacagctgcaaccctaatgagagggctgccacaggcagaggaaatgaagcactggtgcaggagatttcagagtgagagtgctcaaggctgcaggtgcaagacagcactggtaaggactcttagctgaggttcgggatataccccgaggcgcggaaccatagatataacagtggtaacagtgcgtgggcaggtaggaggtaggatgtttcctagaccatttggggtctgaggagaaacaggctggggcctcgagaaggagtcactcagacaagccatatttttagaaagtagtctactgatgggagcaacagttatggcatgctgggggaagagaagggacttttccttgtgaagagccctacagctgcccctatttactgacttgggagaagtaaagtcagaaagaacgaacagctgtggggggaaaaaattctcagttgtcaaaaaaaaaaaaaactgatctgcttagaatgtggccctggtttcttttcccacatgaacctccagcaaatagcaagtccaggaaaaactcttctcattcaaagaggaattattcaaaagtaatcaaaaccacaaatgcatttggtttttgggccagcaattccacttctaggaatgtacatactcacacatgtacaaaatgatgaacatacagtattcattaatgcagcgtttgtgaaaacaaaagattggaagctgtttaaatgacaccatatcagggttctggttccctaaattgtggtatattcatacagcctactcctgggtagacaacaatgaataaataaggagaacttggaaaccatttatgtagtgatgtgggataaccttcagtttatgttattaggtaggaaaaataaggttgaggacagtgactgccatttgtatataaaaaggagaaaaatggtaagtacataattgtgaattcataagttatctctggaaagagacatgagaacctggtaaccctgattaccttgggaggggaaggggcagtggtggctggggggatggaattgagagggagacaactgtatcctttcatagcttttgaaaatgtgggtgtactatgtactatgtggatgtactaccttttcaaaaataaaacatttaaaaagct

SEQ ID NO: 17229 - DNA, 253 bp, Homo sapiens
ttgtgggaaggcctattcccagaagtcagtcctcattgtctatgggaaaactcacattgaatagaaatagtgacaacttctcaactgtagaatagactaatatgttcctcagtatacatgattacccttccacagaatgatctgcttaggccctcagaatattttcaaccccacaaatatggaatcaatttgctcaccctcaaactgtctcagccctcttcacagaataaatgtatctggaagaattagcact

SEQ ID NO: 17230 - DNA, 637 bp, Homo sapiens
cctcggggatatgacacatgcccatgatgagaagcagaacgtggtgacctttcacgaacatgggcatggctgcggatccctcgtcatcaggtgtatagcaagtgaaagcaagtgttcacaacagtgaaaagttgagcgtcatttttcttagtgtgccaagagttcgatgttagtgtttctgttgtattttgttacagtgtgccattctgttagatattagcgttttcactgatgagcaagacatacttaatgcatatttcagtttgtgtatccatgcacctacctcagaaaacaagtatcgtcaggtattctctgcatagaacaacactaccctcctctcttcccagatgtgaccactgagggcagttctgagtgtttaatttcagattttttcctctgcatttacacaaacacacacacatgccacacagacacacatgcgcgcgcgcgcgcacacacacacacacacacacacacacacacacacacaccaagtaccagtataggcatctcccaactgcttttccccatgtgtcctggtcaagcccccctcactctgtttcctgttcagcatgtactcccctcatccgattcccctctatcagtcactgccagttaataaacctttgcaaacgtt

SEQ ID NO: 17231 - DNA, 596 bp, Homo sapiens
cctcggggatacgacacatgcccatgatgagaagcagaatgtggtgacctttcacgaacgtgggcatggctgcggacccctcgtcatcaggtgcatagcaagtgaaagcaagtgttcacaacagtgaaaagttgagcttcattttttagtgtgccaagagttcgatgttagtgtttccgttgtattttcttatagtgtgcaattctgttagatattaatgttttcattgatgagcaagacatgcttaatgtgtatttcggtttgtgtatccatgcacctacctcagaaaacaagtatagtcaggtattctctccatagaacagcactaccttcctctctccccacatgtgactactgagggcagttctgagtgtttaatttccgattttctcctctgcatttacacacacacacacacacacacacagagacacacacacacaccaagtaccagtataagcatctcccatctgcttttccccattgccatgcgtcctggtcaagcccccctcactctgtttcctgttcagcatgtactcccctcctctgattccccgtatcagtcactgacagttaatacacctttgcaaacgttc

SEQ ID NO: 17232 - DNA, 608 bp, Homo sapiens
ccttggggatatgacacatgcccatgatgagaagcagaacgtggtgacctttcacgaacatgggcatggctgtggacccctcgtcatcaggtgcatagcaagtgaaagcaagtgttcacaacagtgaaaagttgagcgtcatttttcttagtgtgccaagagtacgatattagcgtttccattgtattttcttgaagtgtgtcattctgttagatattaacattttcactgatgagcaagacatacttaatgcatattttggtttgtgtatccatgcacctaccttagaaaacaagtattgtcagttacctctgcatggaacagcattaccctcctctctccctagatgtgactactgagggcagttctgagtgtttaatttcagattttttcctctgcatttacacacacacacaaaccacaccacacacacacacacacacacacagacacacaccaagtaccagtataagcatctcccatctgcttttcccattgccatgcgtcctggtcaggcttccctcactctgtttcctggtcagcatgtactcccctcatccgattcccctgtagcagtcactgacagtaaataaacctttgcaaacgtt

SEQ ID NO: 17233 - DNA, 179 bp, Homo sapiens
gaaatagggaggcccaagaaaaggaagagagacgcggaacagctcatcggtggagcagtcagaagacacaaaacattaatcgattaagtttgtcatattctatgggtgcagttcctggtacccccaaaacaattacacacaacagggtgattatagtcaataataacttaattgtactt

SEQ ID NO: 17234 - DNA, 391 bp, Homo sapiens
tcaggccctgctggcccaggtccctgtgcgcatgcacatggaggggtcagggccgctccctagggtccctcctgcccaacatgtggaggtggctggttcccatgaacgtggttgtcagaggcgggggacagcagaggctgcagactggcccacttccctcctccccagggatgccaagcttggatcatggccctaatcccaaccccaaccccatgggaggaggaggaggaggaagaagaggaggaggaggaggaggaggaggaggaggaggaggaggccaggtcctggtggagcctttgcccagcccagtcctctctgcctcctcctggctgaagctgtttgtcaggattaccctcgggctaaagaggaaaaataaagatgttgagctacc

SEQ ID NO: 17235 - DNA, 163 bp, Homo sapiens
gcactgcccggatcccgtgcaccctgggacccagaagtgcccccgccatcccgccaccaggactgctccccgccagcacgtccagagcaacttaccccggccagccagccctctcacccgaggatccctaccccctggccccacaataaacatgatctgaagc

SEQ ID NO: 17236 - DNA, 280 bp, Homo sapiens
ggaagccactgccaccatgggagctacttctcggttccctccccgatggtctacctcgaagggagggctggctcccagttagccctgggaccctccagagagggtttctactctgctccctagtcccagggtgggggtggggcaccccagctgccctgacagatgggtcccctttttctctctcagggcaccccagccccacactcacatgtacgaagttctcaccccagctcctttgtgtggcaccctgatgagtatttaaagcccgttttgaaatgcc

SEQ ID NO: 17237 - DNA, 1408 bp, Homo sapiens
gacttctggaggggtgtgggactagagctgggtgtcacgtgaacccttcctggtagggtgacccccttcccctggagggggttttagagctgccgcctctgctccctctaacctctttggaggcagggttgggggtattgtcattcaaggccttttttttgtctgctccctccccgaccctgtgccctcttctggaggtttctcgtctgggagagtccctcccagcagtccctccacctccataaggacacactggacaaaactcccgcagctcttcaggaatgaccgatgcctacctgtggggttcagttgcccatagtttgaggccttctctcctcccttaccaccgctctggatcatgttactagttccgtcttttgtgtggccttgggccagcttccttgataccttgaagatgggcttcttgtgagtccccagggagaaagggacaagagctaagatttttgcatcagcccttctggcagaaggtgtggtaggggccatttgttttttttagtggacttgggatttgtggtgtaatcatatcattaatgatccagggtgtgggaaaaatggaggtccttgaagtggctgaatctcattgtatttaagacactgtcagttgccagatgtaggcttatttttggagatgtctaggagaggaaaaagctaccaatcatactcttgatatccgtctggctgtgtgaggcacccctacctcatgggggtgtcttgggattgatgaactgtggaacctgcctcctgcgctccccaaagcttattaaccccttaactgtatcggggcggggtgtgtgtgtgcatggaagatgcctgggctgtctttgctatatgtaaatagagccattggatctttatttttgattaatttgttctgattttttggtttgttttttaaggaactgtaatgaacaaatgtcaggatatccaatgccaaataaagatgttgtatttatttagtccacgtgtagctttctgaccaggtgggcaccattactaaccccaggactaccagcctcaccaccgccgccctcacttgctcaggaaacccgcctgccagcctagcccagctttgtgtttttctttcctccccattcccaccacaggttgctcaccaaggtgaagggttcctagccgctgggattgaagacattggcctggcctcgttctctcttcttgcccttggcccagctgggaccaaactctgatcagtattaggggtagagtgaggtagacactggactccctgtccccaccacccctgccccacccagggccaacatgactaagctctctcatgacccacctcagctcagccccccagcccctgccagctccacactatctcttagctgagtttttgcaaataaaatgtgttgtgtatcttgcc

SEQ ID NO: 17238 - DNA, 947 bp, Homo sapiens
gcctggcctggcctggcctggcccccaatggtcagaagagccatcccatggccatgtcacagggatagatggacatttgttgacttggttttacaggtcattaccagtcattaaagtccagtattactaaggtaagggattgaggatcaggggttagaagacataaaccaagtctgcccagttcccttcccaatcctacaaaggagccttcctcccagaacctgtggtccctgattctggagggggaacttcttgcttctcattttgctaaggaagtttattttggtgaagttgttcccattctgagccccgggactcttattctgatgatgtgtcaccccacattggcacctcctactaccaccacacaaacttagttcatatgctcttacttgggcaagggtgctttccttccaataccccagtagcttttattttagtaaagggaccctttcccctagcctagggtcccatattgggtcaagctgcttacctgcctcagcccaggattctttattctgggggaggtaatgccctgttgttaccccaaggcttcttttttttttttttttttttgggtgaggggaccctactctgttatcccaagtgctcttattctggtgagaagaaccttacttccataatttgggaaggaatggaagatggacaccaccggacaccaccagacactaggatgggatggatggttttttgggggatgggctaggggaaataaggcttgctgtttgttctcctggggcgctccctccaacttttgcagattcttgcaacctcctcctgagccgggattgtccaattactaaaatgtaaataatcacgtattgtggggaggggagttccaagtgtgccctcctctcttctcctgcctggattatttaaaaagccatgtgtggaaacccactatttaataaaagtaatagaatcag

SEQ ID NO: 17239 - DNA, 963 bp, Homo sapiens
tggagacccagggattggacaccatctcccaaccccagtactcctgctctccggtgccacctcaccttctttggcttcttccctcttgcctccttctgttctttctgctctcccctcttttccctcctcctcacttccctctggctagcccacccctgcactctctctcattgccgctgccactatcacctgtctctctgccagctgatgtgccctgttgccccccaccccatcccgcacagaaccatccctgcattccacaggggactcgggcaagggtgccgaagatagacaagaggcacacagagacagaccaactggcagccaggcagccccagaggagagagacattcagacagaggaaagtctccctgcccctcattccttccaagatgagaaaaacttgccgccaccccccgacactgatgccagggaggtgggaggaagaagtgggaaatttcccttcccagtacccccaagaacgtctgagccttcaatgttgaattttttctttattaaaattacttttatcttataaaatcaactaatcaaaaatgatatagacgacagcactggctctgtgaaggtggcatctttctgggcaggcaggccatggggcatggaggagggtgcaaagatatgggttgctgtcttctggcctccagctgcatggaggccggcccagggtctagggtgtgcactgggcaagggcagggcggcaggtgtcaggccggcttggacaatgaaaccctgaccttgctgcattccttttgcttccaccaccactagcttctttggaatcttggggtgggggtcatctttggggattatggctgccacccgggatttgagtgtagggagtgtgggagcagccttggcagatggggcacccgtgccctgcaggtgttgacaagatccgccatctgtaatgtccttggcacaataaaaccaaatgtcagtttc

SEQ ID NO: 17240 - DNA, 1203 bp, Homo sapiens
ggggtaggcctgctgattcagagggtcctcttcatttttgggaactcctttccaaagccatatttttgggaggcagagaggggcaggcttgggcaccccttctgccccccccactgagaactatgcaatggagtttcatgaaatggtccacatagtggggaagtagccaggaaatgagaaacttcctcccaccccagacatttttcctggtgggagctgaagcactgggcttccacaggcccctggcctccttgccctagcacactgggactggccccactctcccagctggactcctgcatgctcctccccttgggctctcagatgaaggcaaagctttgatccgacatctgagctctagcctaagaaggagagttgagatttcctcctccctctggctgggatatggagctttggaggttcagagaagagaaccctcacctctgatctggcctctacgagaggtcctcatctccatctggcccaacaattcccagattctgaagcttggaatgcaaacacaggcttcatgggctgtggcctctgcagcgacctgccatccccaggccttgcctgaggggtcaggctgcctctcccaacacacactcagatagcacaaattctaccatccccttccctggctgctggaaatggaccccgcaaccctgtcctctgctgggcccccagcaaactctagcaatagcagctgctgccgtgtcattatgcaaagcctctgaccagtttgctgcagcatttacatctgccctaatcagaggggccacctctaactcctcctcctcctctcttctcctctggtttgcgtccttcctgggttgggctggagtctggactggctgagataagagcctggcaaccagcaagagctgggctgtatttggagatcatgggctgattccatgttcttgggcaacagtccagaagcatcaggggctccggcctgggatgtttctgaactttgggagttataggagacaggaggaacttctcctcctcctcctcccctacaattccttttcacatattcctttcttctccctcttgggtgaccttccaaaactctgctctcaggctgaaatctggcatcatctcaggttccctgtccccagcactgtccccatggagctggtggctgacaaagatgtagtttccatcagtcaataaaacctgagaggagagatgagg

SEQ ID NO: 17241 - DNA, 1328 bp, Homo sapiens
gaacccctccccttttctcctcacctaaacccatctcctactttgggcgcagcacacatattttcttgtcaacttttccccaagcccaccaacttggattcagattgcgacatgcaggacaggccagtcattctctctctctgactttctgtttaatcatctgtgggctaattcccccttctctggtgccataaattatgtggctcatagtaggtgcaccatccaaggagaaggtccctttttccaacttgtaatgatcactaattattattgccggctgtcatgtcagcctccttaccagccactttcctttggaaataacttttttattgttccacaaatagtatgtgctcattgtagtacattttttaaaaaccacaaatgagcaaagatttttttaaaaccttaaatgtctggccgggtgtggtggctcatccctataatcctacactttgggaggccaaggtgggcggatcacttgagctcaggagtttaagaccagcctgggaaatgtggtaaaactccgactctatttaaaaaaaaaacaaaaacaaaaaaaccttaaatgtcaaaaaaaaataatattttcaccatccagacgtcaccattataaattcttagttcagggctgggcgcggtggctcatgcctgtaaccctagcactttgggaggctgaggcgggcagatcacttgaggttaggagtttgagaactggcctggccaacatagcaaaacctcatctctactaaaatacaaaaattagccgggcgtggtggtgcgtgcctgtagtcccagctactcgaaaggttgaggcaagagaatcgcttgaacctgggaggtggaggttgcaatgagccgagatcacaccactgcactccagcctgggcaacagtgaaactccatctcaaaaaataaataaataaaataaattcttagttcatacccttccagaattctctctctttttaaaacctagatgagattaacctgttttttattcaactgttgtctctaccttcccaatttgatcaattttcatgtcattggctgggtgcggtggctcctgcctataatcccagtactttgggaggccgaggcgggcagatcacttgaggtcaggagttcaagaccagcctggccaacatggtgaaaccccatctctactaaaaatacaaaaattagctgggcgtagtggcgcgtgcctgtaattccatctactcgggaggctgaggcaggagaatcgcttgatcctgggagttggaggttgcagtgagccaagatcttgccattgcactccagcctgggcaacaagagtgaaattctgtctc

SEQ ID NO: 17242 - DNA, 471 bp, Homo sapiens
agacctgcaggctgcacccacctcctccccttcctaccccctaggatgctattcccttgggctgtggtggaaaaatgagggctggagccaaaatcaaatagcttgggagactggacattaaaggggctagaggcctgatggttagtgttaatgatcctgtcttagggcagaggccaccagggagtggggatcctgagggaaggggcagggatttctccttcttcttggtcctggctcccaagggcttctgtcttcatctctgcatgagctctccttcccagagaccaactcttttttattttattttattttattttttaatttatgtctggagcctggctactctgcatttgggattggggatgctgggtgggtgtgtggtccatgttcagcgttctagcaacacgtgtgtgtgtgtgtgtgtaaaggctatgcagccaaaataccatctggccagacgggcccacccac

SEQ ID NO: 17243 - DNA, 1427 bp, Homo sapiens
tcaggcctcacccctcccctgggactttcccacccaggaaaggaggaccagtcaggatgaggccccgccttttcccccaccctcccatgagactgccctgcccaggtatcctgggggaagaggagatgtgatcaggccccacccctgtaatcaggcaaggaggaggagtcagatgaggccctgcaccttccccaaaggaaccgcccagtgcaggtatttcagaaggagaaggctggagaaggacatgagatcagggcctgccccctggggatcacagcctcacccctgcccctgtgggactcatccttgcccaggtgagggaaggagacaggatgaggtctcgaccctgtcccctagggactgtcctagccaggtctcctgggaaagggagatgtcaggatgttgctccatcctttgtcttggaaccaccagtctagtccgtcctggcacagaagaggagtcaagtaatggaggtcccagccctgggggtttaagctctgccccttccccatgaaccctgccctgctctgcccaggcaaggaacagaagtgaggatgagacccagccccttcccctgggaactctcctggccttctaggaatggaggagccaggccccaccccttccctataggaacagcccagcacaggtatttcaggtgtgaaagaatcagtaggaccaggccaccgctagtgcttgtggagatcacagccccacccttgtccctcagcaacatcccatctaagcattccacactgcagggaggagtggtacttaagctcccctgccttaacctgggaccaacctgacctaacctaggagggctctgagccaaccttgctcttggggaaggggacagattatgaaatttcatggatgaattttccagacctatatctggagtgagaggcccccacccttgggcagagtcctgccttcttccttgaggggcagtttgggaaggtgatgggtattagtgggggactgagttcaggttaccagaaccagtacctcagtattctttttcaacatgtagggcaagaggatgaaggaaggggctatcctgggacctccccagcccaggaaaaactggaagccttcccccagcaaggcagaagcttggaggagggttgtaaaagcatattgtaccccctcatttgtttatctgatttttttattgctccgcatactgagaatctaggccaccccaacctctgttccccacccagttcttcatttggaggaatcaccccatttcagagttatcaagagacactcccccctccattcccacccctcatacctacacccaaggttgtcagctttggattgctggggccaggccccatggagggtatactgaggggtctataggtttgtgattaaaataataaaagctaggcgtgtttgatgcgcttttaactttg

SEQ ID NO: 17244 - DNA, 708 bp, Homo sapiens
gcccctgggatctgtacccaggacctggagaataccaccccacccccagcccataattgggacccagagccctttcccagcacttaaaacaggagcctagagccccctgcccaaacaaaacaggacatctgtgaccgccctacccccacgccagccccaaactaagatatccctcacacccagcccccattacctagggacaagagtcttccccagccttgaacctaggaccaagagccacctacatccagccccaaaactggggcttcaggccagagcatccatggccaatttcaaattgtgaacccagagacactcccatccacccttctccatgctcatccccaaactggggcctggagcaaggcactctcaaatcttgaaccctggaccaaagcttttccagaccccaccctaccttccaacccaggtcaagacattgccaaatcttgaactcagaacccaagtgttccatgcccctgtgtggatggagtcgggtatcctgactgttggacccctggtccaggtgatcccgaccctcaccagtcccatttgcctccctccagctctgcttaggcattttgcccctcaccccaatgttccacaccatcgacaaccaaggggtgaggtggggacaggcctcagcagggaatggggcgtatatgttagtgttgctgcaacaataaagcctgttgcatctctcatgcc

SEQ ID NO: 17245 - DNA, 370 bp, Homo sapiens
ggaccctgggggctgtgctagggacctgcagtggcagaactgcagagctgagccttggcagtggggcgtgcttggaagccaccagccagcaagcattaatggggctggtgcccactttccactcagcagagctatgtctaaataaagagctcacttccccccagcacttcttgatgactgtgtgccccaagggccaggccagagacccaggaaggcagcgaccccttgggatccctaacctggaggaaattgccagggacccagagggagtgccctaatccaacctggggattttttaaaagcttcctaggaagagatgatctccgatgtgatgaatacgaataaaaggcccttaatggcatttacggct

SEQ ID NO: 17246 - DNA, 213 bp, Homo sapiens
cccatgggactcctcccatcccccaggctggtaccagttctgtaccatatgagaaagttgccttcagaaggtgggaagatcattgttccatcctctacttctggtgcagtcctgggacaaggacaagggaaagggatgggtgaaccagtagggaagctagaaacaaacccaatatttaccaaaatttagggtataataaaaaccatttcaagt

SEQ ID NO: 17247 - DNA, 116 bp, Homo sapiens
aggcaggccgtcctggagggggctccattctccagtcagagtagatgatgaggcccatgcccctcacccccacgccccgcccctacaacctaagtcataaatcctcttcctccctc

SEQ ID NO: 17248 - DNA, 1471 bp, Homo sapiens
gtcagtgaagcccaggaggacctggggggggcaagagctcaggagaaggcctgccccccttcccacccctataccctaggtctccacccctcaagccaggagaccctgtctttgctgtttatatatatatatattatatataaatatctatttatctgtctgagccctgccctcactccactcccctcatccactaggtgcccagtcttgagtgggccccctctcttaccccgtccctttccctgcatcccttggcccctctctgtttaccctccctgtcccctgaggttaaggggatctaaaaggaggacagggagggaacagacctcggctgtgtggggagggtgggcgtgacttcagactctctcctctctctccctccactcctcccaactctggccttggttcctccagcaatgcctgcctgaacaaaggccgttagggaaatccaactccagggttaaagaaaggcagagattgggggggcttggggtagagaggacagtttaggacccaaggtggtcttggagaggaggtgtggagtggaggggtcagcaggggggttgggttccagacagagtggatctggagtctgaaggagaggagtgcgctagagcattctggggtggggcttggaagggcgctgagggcagggttctagaaggggcgaggctttaagcgaggcagaatggtgggctccagagtaggtgggtcttggattggtaccagagcctatggaaagggtgtggcttggaacatttgggagactgagcttgattctaaaggggacagatcttgagcaaggcaagaagtgggattcaggaatgggccaagccagggttccagacagggtggggcttagaatggggcttccatggtggtttcagaaagggcagcccctccccatggtgcagtgaagaaaatgttttacaatggctgggtttgggcagtggagaggggacttggataggagcttccagatgggttttgttaggggtgggggagaatggctctggctacgacttgggacggaagtggcctgagaagagtcgagtgatatggcttgtagggtgaggcgtgggatccagagagaagcaccccaccacacacacccttccccactcccgtgatgaaacagctaggttaataggaggacagaaccaacgggtctgtgggactggcccacccctcttcccccttcccctgcgccctccctccctccacacctccacccgtcctggggtggttggaggcctggtctggagcccctatcctgcaccctctgctatgtctgtgatgtcagtagtgcctgtgatcgtgtgttgccattttgtctggctgtggcccctccttctcccctccagacccctaccctttcccaaacccttcggtattgttcaaagaacccccctccccaaggaagaacaaatatgattctcctctcccaaataaactccttaaccacctagtc

SEQ ID NO: 17249 - DNA, 73 bp, Homo sapiens
attcccacccctccccaactgctcaataaacctcctgccctcccctccccagcaggaggcaggcatggaccac

SEQ ID NO: 17250 - DNA, 385 bp, Homo sapiens
cctcaagatcaaggaaaggaggatggacgaacaggggccaaactggtgggaggcagaggtggtgggggcagggatgataggccctggatgtgcccacagggaccaagaagtgaggtttccactgtcttgcctgccagggcccctgttcccccgctggcagccaccccctcccccatcatatcctttgccccaaggctgctcagaggggccccggtcctggccccagcccccacctccgccccagacacaccccccagtcgagccctgcagccaaacagagccttcacaaccagccacacagagcctgcctcagctgctcgcacagattacttcagggctggaaaagtcacacagacacacaaaatgtcacaatcctgtccctcac

SEQ ID NO: 17251 - DNA, 89 bp, Homo sapiens
aagaagacacgctgaaatggttcaggctgctcctgtgttggaaatttgaccattaaaattctcccaataaagctttacagccttctgca

SEQ ID NO: 17252 - DNA, 192 bp, Homo sapiens
gctgatccttgactcctcttcatcttagcccccctagcagcattccatcccagccagagcacccccaccatcaggccagtcaactgcacaatacacaactgtatttcccaatacacttgagcagttgcctgtgaatgtaagaggtgtcaacaaactgggaaataaaataaaaaaaaataataataaatgtgt

SEQ ID NO: 17253 - DNA, 42 bp, Homo sapiens
cccttgaaagctggaagaactcacaacattgagaattctact

SEQ ID NO: 17254 - DNA, 5048 bp, Homo sapiens
ttctaccagcactctgccacagcatccctgcccagccatgtgggaagtgctttcaatcttctttgttagcagtttctcagcaagtagatagcaattagcagtttgttccagccctctaccctggatgtctctcactaccccttccctagcagtggtcctaaccagctaggagaccctggggaagccacaagcttctacccaagggagctgcagcaaggtgtgatcttagaaccacactctccttcccacagttgccaagggcaagtacttgctgcacagagaaccaaggaagtgccttcattctgctttgtactaggacaccaaagacatcaagtactcatcacccacccatatcatcaacagcctctaaaggctcagagggaatctgccttgcagctctactctgccccagggcttgtggccagccatttctcacagagagctggctgccttgagggcattcacctggcaccagtttcagggcctcacccaagctttgcaggggaaagcacagagggaggaattacactgaaaaaaatgcaagcaaaggttgagtacccccaggtgccccttaggaaggaaccaggtttaaataggctctacccttacctttcccagcagcaagttcaggggaagaggcctactcttagccctggctagtgtgaccctcttcctgtcctaagactttggtcctaccacctcttgtttcatctttcctttacattgctgggggttaccgcaggtgcctaccccagggcttcaccatatgggccattaatagctctactaaaactgacttctagatgtaggtttcattattgggggagggggttcttattgttatattttaaatggccttttgattttatttatttttatgttttgattatttttttcttttttaactaataaggcgagaagagggaagttggagagggaaaagttagcccagaaggaaagcattttctgcagatcagcctgaatccaccgtggctaggtaagcaagtgccaaggcgttgaattgttcccaccatagctaccgatgtctaggaaggagttttccccttgaactcagagcctccctactgtggcctggccttgtgcttcccttaaagtctaagtgacttgagtttagcattccccagcagggtttaagtttttcttactgatttctttttgaaaccaaagaaatctcctgaaatggagaaaggttcagtcatttctctaccatctccaagctatgggatcagtagaggtgagctcagaaggaactcctctaaccattgctttctcagcctgtggcctggctcaagggaaccaaaactcaaggtagctgggagctccagccagagccagctccccagagcaattgaagacccagccaggatcttaggcatacaaacaactaaaactgctgctgttgccaaggccctgacaccagtagctagtttctatgctggaaaagcagccctcaggtggacgatggcaagaagggggttatggccaaatgctgccctgttatccagcttagctccctgttcctcactaactggggccaatccttggtatcacacaacccagccaaggcctggcatctcttctagttactgctgagttcctcagggtccttgaaggtcaactgtagcagcagggatgtctcattcaaccaaagaatttgccaaggaacttttgctgctgttacaaatacttgtcactagcttccatttcctcttcattgtatttgaaaacaatgggagaatcttggccagcagggtgtcctggggtagggggtggggtaagcctttctgtggagctctgggtttgctcttagtactgctgccagaaacactgttagaatggcaaccctgccattctcccctccagtggaagattctactttattcaggaaggctggtggcttgcaggggctaggcttacacaagccagccaagattgagaaggtaggggagtgctttcaatggaggccatagttgtcatcttttcttctgagcaggctctaggacaaacaatgagcaaattgagatgtcctgtattgggaggatgaggctgatatgtttcatcattctcagaatttgtgggctagagcacctttttgggaatatgggcctagggaaaagaacggtcacttacctggacactatggccatagtcttgagtttttctagtcagcatgtgattggttgtaccttaagtttatgacaccaaaaatactattaactctgttatttttgttcttaatcccatctcaaattagtttctagagttagaatcagaacacaaggatgctcattttcacatggagggaaagttgccaaagcatttaaaaaataaccccaaaagtatatctagcagtgaagcttggtagataaaggtgaactgctaaacagacactggcgtgccacactcctgccagggcagtctcattgtgtgtgacggtgctgcaacactgccagtattacttgagatgcagtctctctcccctgttctcagttcctgggctcagccctcctccaaggcctgccagtgagtagcagtttggaaggcaggccaagggagatccccaaagacagttatcagtcttaacttctgctgtctcccgtcaaatacttatacaggcccccatgggtaataggcaagcatgatggctgatagagaagtcagtgcatgagttactatcacatgtccccccaacccctcctgccacctcccagggctctggataattgaatcttcctgagtcccacagctggagactcaaccaggatatagctgtaaatgcccaagtagaatctgacagaataagacagagacactgaaaataaagccctagaaaggaagaaattggaagcaaagaaaaggagaggtgaaaagataaaaagcctccttcaaggttaggttcaggttctgttttccatttaacctcatgtgccataaagctgcccaggcacaccagagccacatcctgaacccgaccctccctgacagtgctgctctgccagtagcaagccccagatggaggaagctgggcccatttctggccacttccacccatttggagctttgccagaggagtcgtctatgccaataatatttctgcaacagcatattatattatttgaagattagtagatctttttgggggggtggggcaggggacagtttctatagatgaagaaccagtgttggttgtacagctgttgggggtcatctatcccatgtgaagctattctttttccaaatcttgttgtttctgcatttgtgtcctccaccactcccttcttggctgacatagatatgcctgccagattgtcatcaagggtcatatttcaataaaaggtgctaaggacaaaaaaaaatctcatgtgttttaactcaggtgatggaagtctaaagattctgctgaaaagtactggaaaggaatttggtcacctatccatagtccttcacagataaacatatgaccagacccttacccacatccctaaacccttaccctggcctctgagggatggtattgatgctataccattcatcatccccagttaaatagcaggatctgccatagcctttttaggggaacagcttttagacatctatttcaagaccatcctgagtagggggtacagagtttaagccattggttatttctgttgttatcacagtattgaagcatggtatttttctactcagaaggatctcaggatcacagccctgccctttagctcactgatatatttcttcctctctggttactcagtggcaacatcacatccagtctaaccccatgtttagaatgcagaaaaagtcaacaataggtgtaatctcaggtatagacctaagcagtatacagagtctagttctggagtctagcctgatcgaaggtaagccattctttctagacttcttccaatcttgaattctgtctagtattttcatcttacttctagctgatagtccaatctcacaccttcatgctcagctccctggaaagcaagggccttggtgatctgctctccaaggcaacctcaaagattagactcaaatgtattccaggaagcaactctgacattgaaaagctttcttttttcgtgatccatattctgttcacattccaactatcctccttctactcaagatatccattgtggtagagtagaaagagtccagctttggcattagaatgaactgtgttcaaatcctggttctgccacttattcaatgaacctgggctactagctcaacttctgaggtcattttcttatctgtaaaatgggaacagtattatcttgcttgcagttattgtaacttgaaaataataaataaaagccactaacaatccaagaagttattaggcagaatcccaggcccaccccaaacccagtgatagcagtctgaattttaactagatttccaggagattcatgaacatattacagcatgggaagtactgacttgttgaaaacatattcagtacatggtaaccattattatagtcctgatctactcaattcattttttccttatcccaggcatattcttgctcttctcgtgttgctcacaactacctgcctggatgaatttaggaaagttgcaggatacaaggttaaaacacaagatcaaatgaacaatccgaaaatgttattaagaaaacagttccggccgggcatggtggctcacgcctgaaatcccagcactttgggaggccgaggcaggtggatcacgaggtcaggagatcaagaccatcctggctaacacggtgaaaccctatctctactaaaaatacaaaaaattagccaggtgtggtggcacgcaccagtagtcccagctactcgggaggctgaggcaggagaattgcttgaacctggaaggcagagattgcagtgagctgagaccacaccactgcactccatcctgggcaacagagtgagactttgtctcaaaaagaaagaaagaaagaaagaaagaaagaaagaaagaaaagaaagaaagaaagaaagaaagaaaacagttccatttacaatagcatc

SEQ ID NO: 17255 - DNA, 1738 bp, Homo sapiens
tgaacagcaaagatgttcagtattgtgctgaaagaaacattgatgtgaacccagtgatcagtggaattgtcaagtacaggtgagcacttctgtgttcccaagaagacagctcatctggtttcttcctgcatcttgggacactccttccctgtctataccactgactcttgctctggttgttgtactcttatacgtgaatagactcttaattcagcacctatagccttttgttgtgcttttttgatgtgtctgccttcattagactatgatgtctttgagagcaaagactatttttccttactctttgcatattctgcatctgagacactacttgaaatatggttggcatcactgaaggttctttgattcaattaatattttgtaatcaccgtgtggcaaaacattccccttccaatctggtgctagtagagtatatgctatctaggcaccatgtgtgtggcttttgtgtatcaggtgtttcagaaatatttcaagacagttgtaagatgtttgaggacaagaattattactcctatttctatgtcataccacacagtagctgcacagttttaagattatgccatcacctagggtaatgttttgtagaatcagtccttcgtgtaacaactctagtgtttttgtactgttgatgatttgcttaaattttattcaaaaactatcacttgctataaaggtaattgtaaaaataaatacagtggacgcaaaataatgttgtgagtttttataaaaataaattttaaaatgatatataagacatttttttgcaatgcctgccctaaccacttcttacatgtcatcttaacatctctttgaggaaacactgtttcctcattttacagatttaacatactgtattatttgatgccagagccaacaggctatatcataggcagtttccaaacttaattatgccatttagtttgtctagatttcttttgcctctctcactgatccatttggctgtagttttcatcccttttccagtacacacagctagctcctcatcctacctggtttctgcatatgagaatgcagagggctgagagagggcaaaattgttgtcatttagaaaaggcatttaggaaagaggctgctattagaggggaacacaaagtgaaggtttttttaaaaaagaggacttgcatcagctgcctccagaacaattttaagaaaataacaaagatgtttagaagaaatcttacggagtttgccatgggatgtgtgatatcagcagtcttcagctccttacaaattaccaaaagtggttctaatatgctagtttgtttgattttttcttttatattataaagcaattgcatcgataaaagcttggactccattttagtgtgacactcttcctcatgataccagtgaaatgtattgattgtgtccccagttgttacataatttgaaataaaaatataacttcttgatttattgttttttaagatgtgatatggtactgtggttatgttgttttaaaaaatgattatcttttagagaagtatactgaaaaatgtacaggtgaaatgatatgttactggtattcgcttcaaaatcatctgagtgtggggtaattgagtacatagatgaaacaagattggccataaattggtaattgctgaagctgtgtgatggatgtttgagagttcattatactattctctatacttttgtatatgtttgaaattttccataataaaaattgaaaaaagta

SEQ ID NO: 17256 - DNA, 610 bp, Homo sapiens
cctcggggatacgacatatgcccatgatgagaagcagaacgtggtgacctttcacgaacatgggcatggctgcggacccctcgtcatcaggtgcatagcaagtgaaagcaagtgttcacaacagtgaaaagttgagcgtcgtttttcttagtgtgacaagagttcgatgttagtgtttccattgtattttcttacagtgtgccattctgttagatattagcgttttcattgatgagcaagacatgcttaatgtgtatttcggtttgtgtatccatgcacctacctcagaaagcaagtatagtcaggtattctctccatagaacagcactaccctcctctctccccagatgtgactactgagggcagatctgagtgtttaatttccgattttcccctctgcatttacacaccagacacacaaacacacacacacagacacacacacacacagacacaccaagtaccagtataagcatctcccatatgcttttccccattgccatgagtcctggtcaagccccccttcaatttgtttcctgttcagcatgtactcccctcctctgattccccgtatcagtcactgacagttaatacacctttgcaaacgttc

SEQ ID NO: 17257 - DNA, 342 bp, Homo sapiens
gagaactccatcaatccagtccaagaggaggaggacgaaggatcctcacaggaggatgaagacctagactcatctgcagaatcttcaaagcaggatgaagacctacaattacctgaaggatcttcacaggaggatgaagacctagggttatctgaaggatcttcacaagaggatgaagacctagactcatctgaaggatctttgatggaggaagaagacccagactcatctgaaggatcgtcagaggagggtgaggaagactaattaaacatggagaaaccaaattggacaaatcctcaccaccaacggtgatgattacaataaaatcaagtttgagaagct

SEQ ID NO: 17258 - DNA, 88 bp, Homo sapiens
atgaagacaagctgaaacaacacaaaactgtttttatctaagatatttgacttaaaaatatcgaaataaacttttgcagctttctcca

SEQ ID NO: 17259 - DNA, 1495 bp, Homo sapiens
cagtggctgagcctagcacagaccctgacagagacccccctcggcctcaaggatcctctttctgaccatcaagcctgcttcttggggggtgggcgggtaggggggtggccatccctgctacccgcccacccctgagtcccttgacttttgtattctgactccaaggtattgttcagacctcagctcctgggggccggcccctggagtcttccctccctggtagcctctaaccagcattcccagacacctgaggcagatagatggatgggctggtgggcaggggggtggctggggctgggccatcaccattccagagacaaggccagtgtatatgcaaactgggggactctcctcccttctctccccagttctggtcctggccaggccatgctacactaacccctgcccccactctcctcccctcttttccttccttcctacccccttctccctctcccttcccctgactgttccacccaggaggaggaaacttcacatagccgtgctcacagttttttattttaaaggaatttggctggggagctgaacagggctccctgtgatctgaagaaagcttttggtgcttgtcctcacaaccacctcagtcctccctccctgtcctcccctgtctcctttcctcctcctgggttcatgttgtaataaaagaagattgttggtgtgtaattaatttgttcaaaagaaaaaaaaaagcaaaacaagaaacttggttccaactgaagcctattttaattttattttattattttcctcttgttagaaataaaacccttagaaacattttttggaaacatgtttctgaagtgcatttctcttagacggggaagacagtgcttccatcaccagtcagtggagcagctgtagtgctggcaggagcactagggctgaagccagggagctctgggttctgaaatcaagttccaccagcttcttaaccttgggcaagacattctgatcctcccccgactctaaccccaagccactttccctcaagtccaaacagatgggctcgggccccctcacccaaactcctacactacaacctcccccagttgatgccctccagtttatcctcctcaagctcccaaagggatttttttgttaatggctttattgagatataatttacatactataaaattcacttgtttgaaatgtacaattcagtgatttggggggtttctaaagtgtagatctgattatatactgcttaaaaccttccatgatgctttattgcccttaagattatacatagaatctcgttcttcctagaatgttttcctgtctaacccatctactgcataattccctgatttttctccacaggttatgcccctgatgaatggggactaaagctcagatgtgtggtcatttgcaacccctgagttcacttttttaagacagcttattgatatatataatgtacataccatacagtcacccacttaaaagtatacaattaaatagcttttagtat

SEQ ID NO: 17260 - DNA, 2294 bp, Homo sapiens
cagtccacgccctcaccagaggatgccacctccgcccccacccccgccgccagaggagtacaagagccagaggcccgtctccaactcctcatccttcctgggctccctatttggaagcaagcggggcaaggggcccttccagatgccaccaccgccaacaggccaggcctctgcctcctcttcatctgcttcttccacgcaccaccaccaccaccaccaccatcatggccatagccacggtggcctgggggtgctgcctgatgggcagtccaagctccaggccctgcatgcccagtattgccaaggaccgggccctgccccgccaccctacctcccaccccagcagccctctcttcccccacctccccagcagcccccacccttgccccagctgggctccattccaccgcctcccgcctcagccccacctgtggggccacatcgccacttccacgcccatggcccagtcccagggccccaacactataccttgggccggccaggcagggcacccagacggggggctggaggacaccctcagtttgctccacatggccgccaccccctgcaccagcccacatccccactgcccctgtacagtcctgccccccagcaccctccagcccacaaacagggccctaagcacttcatcttcagccaccacccacagatgatgccagcagcaggcgcggctgggggccctggatcccggccaccagggggctcctactcccacccccaccacccccagtcaccattgtcaccacactcacccatcccaccccacccctcctatccacccctccccccaccctcccctcacaccccgcactcaccccttccacccacctccccccatggcccgctgcacgcctctgggccccctggcacagccaacccccccagtgcaaaccccaaggccaagccaagccggatcagcaccgtggtctgatgaatggagagagtgagctggggaacaggaaagtctggggagccacaggagagggaccttgcaccctctttgcttcctcggttttttcaaaaatatatatacacatagcaatgtcctcctccccatgtcctccctgccttgggacccgtcctctcacccccagcagttgccatggggtttccttccagattcgaggatccttgccacttgaagcctggactcagggtgctccagcgctggggagtggtgagggccttccagagatcctcgtactctttctcccgtcttcttcttccccacttttccctggaggtctagctctgtggcctcagacctctgggcctgtgtgagctctctgtgagctctggctggcggagaagggcaggtgtccggagctgtcggggtgaaggcttccctggggctcctctggccgtgtggggctaggagagcgctctgtagagttgtggccaaacttcagctggcttggccctctctctgacctcagggcctggccacacacttccatgtgtctttttgcctgctggaggacacggaccattgatgcacttggtgggtgggaccctgcttgtgttggccccacgtggggcagtgcttcctctctcgagccagtctatgccctttctccagtaggccccagcccagacctcttcggcttcaggaacttgcctcgccctgcaacgttcttatcctgatcaaagtccagacaggttttggggggggctcaggtctgggatgagaagggcactgccctccctcacccatattgcatgcccccccgccattcccttacacctaccccacctacaactgaagacaatgcactttacagatatcacccacacacacctcgctggggcaggggcacccagcatcagccctggggagagaggctcccaaagggccaccatgagcccaagatatccttcctgaggcagagattgaagccatcagagctggggttgggagccagaatgcctgagtccttctgtccgtcagaatctccgctgcctctccagcccttttgcagccctgtttatttattataaatatattttttacaagccccagctcctcttcttgccccgcatatccagctcctcactcagctcctgcctccctctcccctctccaccatgggctgcagtatagacagacagatggaccctggctgtacgaagggccagggccactggggcttgggggcgggggagggtggcagtgggaggggctgtatggagaggagctggggttcaggcattgtcttttttcctccttgtatataagaatgtatatttgatgcctcataaaagaccttgtgctc

SEQ ID NO: 17261 - DNA, 5952 bp, Homo sapiens
cagtatttttgccctcccgccctgtctggatccctaagctgtccctctcccaatctctggatatttgactcccaaccttccccctacctcctggccctttttggtgtagtcatgggatttaggcactgctaatcaagcatgaagaggaacagaggtgatgttaggtctggagcaaaaattcctgaacgacagggagtattctggcctctgaaaggaggtgctgagctgaacagggccatctgttcatcacacacacccccttcctccccctcatcacccataatcgtgggccccttgggcctcttgcccactgtgtgtgtgggtatgtatgtgtgtatgtatgtatccgcatgtgtgcatgtgagtatgtttgcaaaataataaaggatattggagacctgttttagaaggagcctaggctgaatttgattccaagagagcttaggatgacagcacccctgagctgggcaaaggtactcaggacctcataggagtcttaggcagttacctgaaactgccttcattcactcatttgtgtattcattcatttatgtattcatcagacacataccgaacaccctctatttgtcaggctctgtgcttggaatacagagttgaatcagacatgatctctaccctcctagtaaggagatacagtgggttcatgaatgactatagttagctgaatgtcatatgtactttgaatttgagaagtgggtgatcccctctaggcttcctggaggtcacatttaagctagaccttgacaaattggtaggatttggtcaggcactaggagtggagcatgagctctggggacagacagttatgggttctggtcccactttttatcacttactagttgtttgaccttgggcaagtcatttgaccttctgtgcctcagtttcctcatctgtaaaatggggctaacaatattacctacctcataggatttaatgatgtcaagctcctcactggaggccttatcccttcgtggagcccactaggtgccgacccctcagaatataaccctcatgcctggacccctgagagcttctgatcccagctattagggacagaagaagcctccaaatctggaaggtgctgaatgccctgctgactgggaaagtttcagggcactgatggggtctacctggtaagcggagggcctgaggaaacctgtagcttcaatcatgtctggtaaccgggtgcctgagccccaatctgggttgtgaggaaataggggagaggtatcctgggccacatcccagcctaacacctgtgaggttcattttaggaactaacctcattagctataaggatcatgcagaggcagcaaagccgggtgcgatgagctcagcctttactcattcacatacaccatcacactttaattccaatctgtatattgctttttaaaagttaagtccattctaattacccaaatatgcatgaattcattctccttttgagaagttagattgttaaagatagtctcattcagctaccaaccactccttgatccttcccttcttagtggctgttgtttgttgtacttccgtttagactttgttttaatgcttgtacgtacatatgtgaactcattggaaatattgtgtgtttaatgcaaatgatatattgaattgtttagcaatttgttttctttgcttaacgatgtttttgagatctgtgcatgttacttaatgtagctcaatccatcttctgtaattgctgtatagattgtcatcatatgattaccacattttacttacgcatttcttttgtgatggacattaagactgtttttaggttttgctattacaaaatactacacaggagcatcactatgcctgtgtgaaagtatatgtatgaaagtttacctagggttgattcctagaagtggaattgcaaagtcataggatatttatatattggtttttaataatacttccaaattgccctcctgtactatttactcagtatttttcttgaggttgatctgaggtctaacattgttatcctatatcattttcatcccaagtagtgatatctgtgaaatcacaggtttgatgtgtgctaattatgtattcttctaatacatattaaaagacataactatcaaaacaaaataaatttgtctgttttcaaccaaagaagtcacgtaccactggtggtactgtgtgccataatttggcaaatgctggcctttatggacgagcacaattcgggggtcagacctggttcaaattctagctgtagaaacttgtgcaagttacttcacctctgagcctaagtttccacatctgtaaaaggagataataaacacctaccttgcagtagtgaagcaaagagaaaattaaatatatatgaagcaatttggctggcatctagatcattcacagccctttaaaggtcacctttgctgttctccccactttacagataaggaaactgaggcccaaaaaggtttgaacccaggtcttccaagtcattcaagtgctttctccactgtacaggtggttatcaaccttggctgcgcatcagaatcgtttgtaaagctttttctttttcctttttaaaaagtaaagcaatatatacacaggtaaaaaaataaaatagtacagaagggcttataatgagaagcagcagttccctgcttgcacccccacatccaaaggatgtggagctctttaaaaataaattgctctggtcccacctctggaaatctgattcagccagcatggataataacccagataactaacccctacctcacaggataaaaaggattacatgagatgccttaggctaaggccctggcacacaggaacacatgtgctacaaaggagctttggggacttaagtcctgaggatccaggaggtgaggtgacttgtccaagattccactggtttagtggcagagcctagacttccactcggatctatttagtgcttgccccctgctctctcctgtcgtgccccaccacctcctggcatcacagggcaaccgttgtcaaggctatgctcacgggaggctgggcaccacagtgtttccaagagcaagctggatccgagtagattccctagggcttgttggaggaactagtttgactcccttatactgtggacgcagtagccttgctgtagggagttgaagagtactccacaacagtatcttaagtttaactgggcacttccctctggaaatcacagtgttgtgcaccaggaacacaaagatgagtcaaatctttatcctgcctttgaggagctcactgtttagttggggaaaccatttgtaaaacagccattaaccatacagtgtgatcaacactgacaggagcacaggaaaaacatctagcttatgtgaagattcagagaaggcatcctgtagtctaggtggtgatacctgaactgagtcttgagggacgggtaggaattagccagttgaggaagtagaaggaatttccagatattggaaacagtatgcatgaagacatgaaggcaagaaacagcaaaacaaatactgaagcatgaagattcctggggtggggggaaagcagcaagaaaaggtagagaggaaccagattggaagagggtcgtaaatgcatggctacagaattcagatttgttttgtaggacagtgtggttcccaaactggctgtataccacaaacaggtacggcattctgggccccggcccctaaaacattcattaagtctggggtgaagatttggaatcttgaatgcttataaaggttaccacatgactagggtacagccagatttggaaaccatagcttgaaggcagtgagggagccatgaaatggtttttaatagggggactccagatcagatgtgaacttaacctgtttctggctggctagccaaccagcatggaaaacagattaggttagatgttcatgctgtatgtgcccgtgcctgtagcttccctgttaatcagcttcttacactactatatttgcttattttgtctctgaataagctttaggcaccacaagggtgggcctggggatattttgcttaccagtatagcccctgcaaaaaagcacagtgcctgacacaaaacaggcacccagtaaagtttttgaatgaatgaatgcatgagtgaatccatttgtgagagagcgaatggagatgacaagattagctaggagactggaaaaagaccaggaggcctgcactagggcaaaggccagtaggaatagattggaggtgttaaggtgtgaactgttaaggtaagatgataacttaatgactgattattggatgtggagggtgactgagaggatagaatgagtacccatgaatagccatgattcctaccctgtcccagtcatctctttccttatccatctctgaaacaatctgcttacatcctcctcagcaactggaattcctcaagttagttagacattctgtgtgctgtgtggtctctcactgcccccccactccccacccctccacaagccattgattcattcatccagttcaataaatcttggctaagcacctccagtgtgcagtaaggctcttccaagccaggactctgactccctctttcctacctcaagagatgtttttgagggctttcccaggtaagagtcacatctcttatacaataacttatagtgagatacccagaatgtcagacttgtaagggaagactgcccaaaccccttctgaggtcctcagaggggaattaacttcctaaggtccgactgctaggaagtgttggagccagaaatggaacctaggtttcctttctatgtcatctctggagtcttgatcttgatctatcccattgtagatcaggacaggcagaggtggtcagggagaaggtgggacttaggttgaaccttgaaggtcaatgtattggacaggtcaaacaagatggttgccaattacactgcccccttctggaaacccttagcaaacctgccatgcttgcagtcccttctaaggggtttccttagcataagttgccatgctctgtaccatgtgacctcacaatcctggccacagatagctagatgtggatagtgtctggttcaagggcaaccaatctctaggctggccagtggcctgttagctggactggcataaggacttcaccttacaggggtggcatgtatcaaatggcaaatgtatgaaacaaccagatctttcagggaggcagaatgtgagctattcagaagaagtgaacgttaattagaatttaatgaggcattagtggtggtggatgaggggtggccagaaactaaacagcaaaagcaaagagaaagctgcagaaaccataagtaagcagaggtcatgagacatttgtataatgagatcacggagccacagggtggcagaagccatgaagcagcaaggcaacaatgggctagaagccatgaagcaataggagccacgaggaacagaaaccgtgagacaaaactgactatgagatccacaaagcagcagaaggcttgaatagataagatcatgagacagtagaagcgatgagactgcaagaaccacaaggtagccagaaccatgtggcaacatggcaacaggaatggaagaggcagcaggagctacaatgcagaaaagccatggattaataggaactgaagcgccgggagccatgaagctgcaggacccatgaggcagaaaaagccatgggctagcatcgaggggggcagaaagaagttagtcagtagcagtaggaggagtataaatacagccagaaaggagttgagtcaccaatttgggaagcactagagaagggagcaacagatgcctgcagctgagggggtgacaagataagccaggctctagagctgctttggatcatgaaccattttcaagtttctgttcttccatgaggctgcctgtgtagctgttcttgtcttccttatttccctgtgaatgctttaataaatccccatcact

SEQ ID NO: 17262 - DNA, 146 bp, Homo sapiens
agggagaaggcagagaaaacacacgctcctctgcccttcctttccctggggtactactctccagcttgggaggaagcccagtagccattttgtaactgcctaccagtcgccctctgtgcctaataaagtctctttttctcacagag

SEQ ID NO: 17263 - DNA, 518 bp, Homo sapiens
taaggccctgcccaactccgtggggttttttttaccattgttggacctggggaggggggagttaaaaaaagaaccagaaagaaattgtcaaaaaccaataaatgaaatccaccaactcaccgtgtgtgtcccagctgccccatcttccccagcgcatacctgttcctcttctcattctctccccgccgcctgtttcctcaccttctctcccctttccatgccgtccatgatccccaccccatgtgttttaaaaaggcagtagcctttgcagggacctgtctgtcccaactgtttgaacagtgtgctcctcagattctgtgttcagaaggatttgctgcattgagacttgaaacctttggataggggaaaaaattatatatatatatatttttttgttctgtttgcatttcttaatttgtgcttggaatgtgttgatgtgcacagctaatgattcaatgcgagacaagattggcgtctgtgttgtggaggtttcaaataaagagcactcttcataactc

SEQ ID NO: 17264 - DNA, 2478 bp, Homo sapiens
gccctcctgtgtcccacccctcacccctttacccccattgccttctccattgtcaactcttggggcactcctggatcctatctgccctggacaaggtgctgaggtgcattgtcctgctttcttgggacttaccaaaggcacggacccctccaccgactccttctagttcccttccccactttcactagagcatcctgcctgccttctccactgaggagcaggtaaatgggagaggtttccagctgactagaaccctcttttctactcgtccaaaccactcccgtcacctgccttgtctgttctttattcttcatcccccgctagagctggaaggcaggatgaggagaggtatgaaggagcctgagccatgaagtgggaagcccagtgcttgacactttctgcaactctagccctatatccagaagcctgcccacctccacccattctgtttgccccatttccccagtccagtggacatgccccacctccagacttgctcatgggagaaggctgtggtctctgccccctcttgccaaatgcttcatggaaatgaagaggaaggcctagagcctccttcctgccccactgtgggccatttccagaagtggcctagaaatgccaacttcacttacctttcaaaagaaaggtgattcctatcacttgtcaaggtagggagaggtcagatgcccaagcctttgaccacggttttgtagcctgttggaggaagctacttttagctggctacacatgaggccacttgttttagggtgagctccagggatttgcctggattttgaaatcatgtagaacattatccacgtggctgtggctgtggctgtggctgggccctggcaggtggaaaaccatctcccagaaacctgaaagcacctgccaatgacgcagataaccctggccctacagcctgcttgctccgcctataccacagagcacagcctggacattatggagggtgtggcgggacggcccacacctgggtcctccatcgggaacttttcatgcttctttctccacctgaggtcttggtctgaagaagacctcaggactcacatcttcactcctgggcctttgcacttccagacgacaggtcatcgttcaagcagaatgcagacaggccattcacgagcccaagttgaagagaagagacgcccatccgtgaaggagcagaccatccatccgatcctccccttcccctgtccttccttcgtggattgtctccattgtccagacagtgcccccacctcccaccgccttgcctcactggcaatctggactcgatggagaacatccccccacctccatttggcactacccaagtggagtgtacccttgccctttccacctgtaccacccactccaacctcaccccagcttgcccaatgcttctggggaatttaatagctaccatgcaggccacagggaatttgtgaggcttcttttgtcatctttgtatctccagtttgtctttcttttctccatagccctgcctctactttccttccttggaatcaggggttcctttagcccatttgctttctctaccttggggaccccaggggccaagcagttctccatctagtcacaccaaaggcaaaaagcctggctacctcccccctagcacgtgagtccctactcccctcccctctgtttctgcccagctttgcttattttggggatttcaaggcagcagagggtagtgaggggagagcaggagaagcctctgtcctgtataggcaactgcctgactatgcggtgactgctgtaaccaagatcaggtccccagcccttttgtccattaacaccccttcttgatctttcaaaggcagctaattgctagcaaatccccccgattccggccttttccctctatttctttgttagaagttttctgtggagctgaaacccagcctctgtttgactgggtttcatttagcttagttgggttcttagagccccctgtttgttgttttgtgttgtttccaatgaaaagcaagtttaccctcagagttatgcttttccaaagaggctgatgtctttgtttttgttttttttaatgtttcaggttctaagtgaagtgagttggggaggggttgggagtgttagtaatcaaggtttagaacaccatgagatagttacccctgatctccagtccctagctgggggctggacagggggaagggagagaggatttctattcacctttaatatatttttacaaaaaaagcaaacaatttaaaaacaagcccaccgcttctgtacatgtctaaatatatttttagaagtgggtaggattgtgaatttctgatgcagggcctttttataaataggttagggtagcatcattcagacttctctgttgtttttgtccctgtctttttcttatgttgtgttactaatgtaatttatattttttttagatcctccctttcctatagagataaaagtgatttatcttggcaa

SEQ ID NO: 17265 - DNA, 873 bp, Homo sapiens
taagctgaagatggcttcaccaaaccaggaagagggaaaaacttttacttttctgattttaggcccaagctagaggaggatataaatgcttaccctagatttctccaggattttggtgggatgtcctattgtgtccatcttttccccttccctgcctgtttctgggacttcagattcagtggtctgtttctggagaagttctggtcaaagatgaatggcagtaagactaggtcctagtctcaaattgaagatatagcaccaatagtttatttatctcctctgggagcctagtaaggcagtagctgtcagaaattgggtatcatcacataaggtcctatagaaaagctctagctttggtttttctgagcatttataatgatactcattatcaaagacttatatgataaacctatgaggttgtggggacagctgtggcctcctgaggtttttttttgttttttttttttctctatgaagtggtatctacctcttcttcactccttccaacttacctacccctggattttgtaccaccacctctagctttggcctgacaatcagataggtagatgttttcagaaaagtaaggtagtattggttattttaatttttattttttattttatacacttcaaaaaaactatcaatggcctttgtactgggggattcaagtgaatcagaaaagtactgggcagatttttcctgcctctcaaccagtgcattgtttgtaaaatagaagatgtggcacagttcattcactccctattgcccacaccatgaaagggtgggaatcagtgtaatgaacttgagtacgaaagggactcaagagactgtgtgtgtgtgtgtgtgtgtgtgtgtgtgtgtgtgtgtgtg

SEQ ID NO: 17266 - DNA, 1902 bp, Homo sapiens
atcagagtagatggtgataaaaagggaggttttttcagaattattttcaggacacccaagatattaaagtttcttcctcttgggttctgtcatattttccctcatttgagtttactttagactatatattttttgttccagtgtggtatttgatacagctcatcattctgtagaaatgtgcagtttgcagatagaacactgcacacagaaatgttttttcacttcaaattctatcctctttgatacttgattttttaaaaatactgttcagaatgctttaataagctcagcttgagcattaccatttccaggacactttccatgaattgttgagaagctccccatcccccgccttttttttttttttttttaactgctgctatctgcagctggatactcttctttaaaaatgtttaaaaattatttagattgattctccccaaatgtggatgaactgagaccctccatcagccagagtcttatgggatcttcacttcacatgtttgtcttaggtttacctttcacagaaggcagggtaacttgctgcaggaaacgttttggtgtataaaattagaatcacttttttttttttttttgagatggagtctctctctgtcacccaggttggagtgcagtggtgtgatcttggctcactgctgcaacctccccctcctgggttcaagcgattctcctgcctcagcctcctgagtagctgggactacaggcgccagccaccatgcctggctaatttttgtatttttagtagaggatggggtttcactatgttggccagactggtctcaaactcctaaccttgtgatccgccctccttagcccccccaaaaaattacaataattttgtcaaccaatacagaacatgagccctttttaaatgtgatttcccgtcatcacagcagtaggatgaagccttgttttgggtgagacagagggaaagggaaaaaacagaattgtaacagttccttgattctgcagatactgctgctgttttacgatttcagtaataattcaaagcagctgtctccttgtttctcacatgcatactacattggttttgagcatctgagaggcattggtttgtcttgcattcttttgcaaggcatatattgcagctgatatgaatctcgtttggggggaatccttgtattcctaacaagggggattaaagctacacctcaatccattcttctgaagtgaaatttacttgacacagtaggtttcgagacttacatatgaaacactggctttacagggttctcagagatgtggggtatacactgtcctgcagtgagatagtagaccctagaaggatactatttaagttgtccttagctctttttaattacaatttttagttgttagaatttctttttagtatctatagtatcttagatgattttagatcttaaatgagtttggcagcctctttagaatctgagagagatcactgtcaagttgcactttactgggttttatccagttttaggaggaggggaggcaatgtcaaaatgtacacctttggtttttaagaaggttaactataataatgttaaaggctagtcacagggttacctaatgctcagtctgtgaaacctaaatagaattcttaaaatgttatttaccaactaagtattcatgttcaaattacttaccttccactctgaagactttaaggtcatttctaatacacatttacctaattaggagttctgtctactagtaaacattccaaattgctacccaacattactgttaacagattttcctccgtattcttctaaaaattataccccatgggcttgccaggtaatgacgaaaacttaatgggtgtacttttttttttttttgcacagtctactttgtgacattaagtacctcttttcc

SEQ ID NO: 17267 - DNA, 653 bp, Homo sapiens
agggtttgggacaaactgggagcccccaccccacactctagttgcccatgtctgattgggggctctagccccttccctcccagctcagtcaatacttgaactcccatcacgggcactttcaatcccgaatgctgggtcttgggttttttaattcatcttttcacaaaacgtgggcttttaaaaaatatattcctacagtgatgtcaatttttattaatccctgtccccagggagggtgggagccgttgccagtcctacctgaattaggtcgtttttctccctcatccctcaataccctaccacagatcctgcctccacccagttccccacaaagcaccagaggtaggagacctggattcaagtgccagctctgccactgaccctggggccccgacccagccctgcctcctcagccagtgtcttcacacgtacaactccacgtggggtggcaactagacctctcctgcctctcccatggcttacagcttctacccggccccaaggctacccagtattttatcgtccagacccatggcagggccagcgggcaggacagggaaacaggggggaggacaatggatactcagttttttgtgtttttttgtgtgtttttttttttttaagaaaaatacagtttatttcaggcttacagt

SEQ ID NO: 17268 - DNA, 712 bp, Homo sapiens
tggcttctgaattccagagccaggagacctgaatttgggagatccagaaaccagggcatggggtgagccagggacagagacccaaggacatggaagcacacacagggacacacagactcacgcatgttctaaggaacacatatacaagggtatacaaacacatagacatgcagagacatagagtcagggactcctgcatcttcatggtccttcacatctccagtctcaccctctccaaatccatgctcctcaccagccctacaagccacttttgtaaaacgaaaaaatgatcagtagttctgctcacagctttccctaactcctatggcatattcaaggctctcagagtttccctaacaaaccatgctcactcctaccactggaccattgcatgtgcttttccttctgcatgaaacactcttcctttgttcctgtaggtgagtataattcatccttcaaatcctagttgttacctcttctaggaggcctttcctgatgcctgccctagattgagtttggtcctgtcctctgggttcctatagcccacccccaaccctccacgctcacagtatttatactgtgtagtaatcatctgtttacttgtctggatccctgacttagactgtgagatctttgagggcaaggaccttttctgaatcatctatgtatccccagtgcctctcacataataggtgcttagtaaatatttgtt

SEQ ID NO: 17269 - DNA, 246 bp, Homo sapiens
gccctttccaagaagtcaaactgcctgtgtcctcatcgccttccacctttaggaaatgctatctttgctcttctcctactctgccttggcctcactgaggcaccccacttccagtgaagaagtcctccgcaactcccaaacaagcctcgcttgctggccgcaaccaaggagctatctagctctggaggaaactttctttcttaattcctattctctgacgaataaagacttactgcctacaagagg

SEQ ID NO: 17270 - DNA, 124 bp, Homo sapiens
gaagccagctgcctaggattcacaccccacctgcgcttcacttgggtccaggcctactcctgtcttctgctttgttgtgtgcctctagctgaattgagcctaaaaataaagcacaaaccacagc

SEQ ID NO: 17271 - DNA, 677 bp, Homo sapiens
aactacttatctccgctatgaaggagaagtattttcaaggaatatcagaagaaagtagaaagtgagaggaggttccagctgggcttcctgggtcaagtaggggctcagaaagctgtgaaactcactcatttcctgcatgcggacttactttggtcctggatgaataatattgaagatatgtgcttaaaacattcctaacatcagaatttgcgcctgtgttttcttccccaagaaagctataaacagcgaaaattttgttgtaagcttccctgtgtcctctctccctctctcccttccccctcccctgaaactaaaaggaatgttaaaagcccacttttctgtgaccagcagaccttatctatggtcccaattccaattccttgtaaacacaatttgtaaaatcccgtgagatcctgtctcctttgccatcccgctgcaaggttataagtagagaaaacttaagttacaattccagttttcctcaagatctgagacatgttaattgtctttgtttctccctctggtaacatcttcccaccacacatatttcctgccttagagagtttaaaaggtgataaaaaaatctaacactggctaccccgctcgggaccccttccacgctgtgaaagctttgtactgtcactctgcttaataaagcctacagcttttttactctc

SEQ ID NO: 17272 - DNA, 88 bp, Homo sapiens
atgaagacaagctgaaaccatacatgcagtctttatgttggaaacttcaccagtaaaattctctcaataaagtttcacaattgtctgc

SEQ ID NO: 17273 - DNA, 275 bp, Homo sapiens
tcttaccagaccacttactgaaaaaaaagtaaatgattaggcaaggattttgaagtgacacacagacctacttggaatggacaatgacagtaacacctatgtgacagctagtatcttgatataaagaacctattttagcatggcccatgggtctgtcggaagaaaaaaatgaatactaaccagtgaccattcaaccttaagaaatggggagagggagaagaggttgaaaatggtcacataaagcataatgaaatgaaaagaatgctttaggtggg

SEQ ID NO: 17274 - DNA, 3339 bp, Homo sapiens
aggtcatcttgaaatttgccaaatatatgagactctaaatctgtagacacagaaagtcttgattgctttccagtttgtaagaaccatcttctccctttttgcacgttttgcttggcaaaaaaattggaacttctgccctctcatacgtttttggaagaaaccttttgcccatctgtccaaccttttcactggttcctctccgcaatttaactgattagtgagaagggtaaagtctgacatccattggctcatacttttttttatcttgggtggtgttaatagattaaaggtagctgaacacctctcacctcactctttttggcacttggactctacactcattgaggtgtgaagcttgctgagatatcccatgtgactggctgggtaagtgtctttgcaatctcaaatctcccccaagtggcttcaaaaatctaacttgggaaagagtgggaagcccattttggtctcttgttcaagttgcattctcagttctaactgtactaaaagtaaggctaataattttgctctctttccggttctttcacctattgctcaactgttttagaattaagaaggtaattactttgcattttagtacctaaccataggctgagaaaccttgcaaaactgataagaagacaagcatttggggaccaaactccaagtggagagatcaagatttctggtggagcttaagtgaaaggttttagtcatcagtggcattagggtctctcttgtctccaatagctctggctggtatctgcagacatggagtaggttttaactgatagaagctgtgcaggcagactttagcacaaatggtctttgccagcccagaggagcattaagccaggctctagctagagccctcagtcacaggcaaaggctgggtttggctgggtttggacagatctgtccagaacctcaaaatgaaagaggagaaacctagaatcaaactgagatacagatttctttgctgtgctaagagagactcaagttttagatttgattcttaggagactgaattcagagtcccagcatgtgaggtgggcaaggcacttgtgagaaccaagaatggctgaaagcaggctatacttccttgcagggactggtgggctcatctattatggtatcccagcaggacttggaacacagtcagtggtaggtaatctgtaggcttaatgatgttttaagtgctggcattggtagatagaaatctaatagatttttgttagtgtttggatttttaactatcctgtttcttggctggccctaagaaacttatatgcagataagggtgagttctactgtggcagaaaagtaaacaatggaagggcctttgagctttccattattaaagagccattggcggaggttaaccaaagcctaggaaagaaaagttgaagtacaagcatggtttttgagagaagcacctggccaaaaccaaagctttctcattgaggttctcacagaagctccattagcagtaacagcctaataaggccatggagttctgcacatttggggctgggactcaaggcagtacaatcatattgggactgtactgcaagatatcttccaaattagtttaagttcacaggtcatggagtccagactaccggcacagattggcatcctgctgaggatgaaacaaagaagatgttctcttttctcctatgttttatctgtctacttttgctttttgatgccactaagtctctactatgatgtttgactgacaacagcaatgtgggtctgtattgccctatgttctaagtcctggggtcatatatttgcttaaaaaaactgttctagtggctggggactagtgtgctttctaatttttttgatgtgaggttgatattgtgataatcttatgtcttcttgaccctttggactctttaatatgtatgacatgcaattgtggggttagattaattcaactcctgaggtcctgaaggaacttcacccagtcaagaggaagacagccaaggctgcagctgctgaaggaaccccatatctgggcagacatctttgtgagatctatatggctgaaatgagaaaaacgagaaattgggaaaggcagaattttggactttaattattttggactttgaattagaaatttaattttgggcagtcctttttcccttggagtttaatagttgatggggtgggggtgaggtcatatagttcaaactaaggcatttttattatgttgttgatattgtattatttggagtattttaatgctatctttgggagtcattgtataattgttgtcagctatgtcaggaaatatggctggacataattgtaaattagggctgcaattgtgatcaaattttcagtctagggtgtaatgtagccttagagttaatttaattactgttctattttgacttatttcagagcctcttgggggcaaaaacaactgctcaccaatcttacattgatgggagcagaacttttctaagatactgttggtctccctggaaggggacagccacagccctgtttgttgaccagagtcttgagcattaaccattgtggcttaagagaatgaaaatgtacaagggtatgatgggatctatcctcttcctctctccatgctcctgactcaagaaaaggaaaagacttgcatctctcaaaaatgtttggaagaaagttctacccatcttctcttacactcattcaatcttatgcttgggaggaggaataacttgatgagattgagaaaatggttataatggataggcagcttaggccactcttggatcttgagttcgttccacacagcaagatgtgggaaagactgcagtccttcactacatggctgggtaaacatctgctttctagacccaactatctctccttggggtgggggaatcccaaagtcgttagacttatgatagaagttcatttcagcctcaggtccaagccatgttctccaatccagctctatcagctataaagctggtatctattttgattcttttttacagttttaatatataaattgttttttagaaaaataacacatgcctatggtaaaagtcaaacagtataaaagggtatactattaaaaagtaagtctctcttcctccttctcacccctggcctcagttccctggtcccattttcaaaaagtaacaactgttaccagttactgatgtatcattccagagatattccatgtatttacaagcatattgtgtgtgggtatgtgtgtatcaggttttttttttttttttacacaaatggtggcatactatacatgctgttctgaattttgcttttttcactgaacaatatattaaagctgatatcttaatccct

SEQ ID NO: 17275 - DNA, 170 bp, Homo sapiens
ctgttagggtaaaatttggcacatgtgtggaaacaaatgtataatttgtagacatgcaaaaaatgttgcctttcagtgtattgaaagcttatggaatccctgataactaaacatctttgccagcattaactgttgttttgctctaaaaaatacaaacttgtgtgtacatg

SEQ ID NO: 17276 - DNA, 170 bp, Homo sapiens
ctgttagggtaaaatttggcacatgtgtggaaacaaatgtataatttgtagacatgcaaaaaatgttgcctttcagtgtactgaaagcttatggaatccctgataactaaacatctttgccagcattaactgttgttttgctctaaaaaatacaaatttgtgaatacatg

SEQ ID NO: 17277 - DNA, 257 bp, Homo sapiens
agcaactctattcattccttgccatgtggctaacttttattacagtcaattttgaggatattctggactaaatatttaagtgcagtcatttctttttggtttgcaaaaagagcacagccctggactatgagtttggagatctaaattctgatcttgagtctggaactgacaagttgtgtgaccctcagcaagtcacttaacctatctgagccttaatttccttatttataaattgtggtggtttgaacacattgctc

SEQ ID NO: 17278 - DNA, 2841 bp, Homo sapiens
attctttgtgctctttagagaagttgtggatctgttagatgtgaattattttgtgttctcgtagttgtgaacgcagagaagagtttaggtgtcagaaattcaggaaagtggataaattttattgtgccaacaaatcttaccttgactagtttcacaattttgcctcaagtgtactttgctacttttgatattgccttgttctgtaacttaacagttaaattgggtgctaatagaaaattaaaaagtgtttgcaaccattggaacaatgcaaaaatagattaagaaaaattaatggtgtaaacccacaccccgtccttaccccttcctttccttaccttgtttcttcccagaaaacaagtgttgaggatgcgaagtacatccttccacctattttccccatcttcatgcagaaagtatgttctagtagtttctgtaaaaatggcaagccacatgcttttctcacttgacatgtagatgatatctcttcttatcagtagcttcagtctttcttgctctctctggctctctctggccctcactcttactctcttgcactcttgctctccccctccctcccttactctaacagctgaatacacagtacttgttgatgtaccaaaaaggcattcaaccatttcgttattgatcgtcttttatttcctttttttattttttttcaaaataacactgctgtaatacatactggtgcttttatttatataggttggattcccagaaatactatgtaggcatatgtttcagaaatattacaagattactatccaaaatgaaagcgcccgttccagcgtcctctccagcactctttaatgcttgaaaatatgaaaggctaaaaattgcattgtattgcttgttagtttaattgccttttgtctgagttcaaagaggtttgttgttgttgctgtccttgtttctgtttggatttttctctgatttgcctgttcttaccctttgctcatgtatctattgatgtttttcattataaatttgtagaaattcttactacatagtgcatattaatcatttgtagctctaatgtgttatgacgttttcatcttgactttattgatgatatattttcctttaaaatttttaaactttttaggtagacccttatctcttttatagattttggtttcctttttttatcacatggatgcccccacccaaagtcatacaaatattcacctacattttcttctaataactttattatttttaatgtttaaatgtttgatccatctgaaatttatttttgtatatggtgtaagatggggatccagctataacattttgttcacattggatacctgattgtgacatttatttaaaatgttacccattttcaaatttctgagccaatatcatgatttaattatagtggcttcatcgtaagttttagaatccgataaagcaagtcccacttcattagttttttttttctttatataatatgtcctagacattcattttttcatgtgaaaaaatgaaatgcagaattttaataaaattctaattatgatggctgacatcacaattaaaatcctgcatttttgtttagagggctctttaataatattaaatcttagcactcaagagtcttcgtacatcattgaaatcttttggtcttgttattggaatattcttcacgtaagtatatcatagctaactgaatttatttctaagtatttttacagttttatttcatattttgacattgtgaattggtttttttcttctcatttgtaattagctatttttgacaatatagacaacctatagatttttgtatttttatcttctgtctaatgagcttatttaatcattgaaattacagtagatttttaagaatataatattttgggttttctagatatgaaattatttcacctgaacatatagatcattttatttcctcttaatgtttatactgattactgttacattagctggatttttcaaaacaatgttgaagagtgatgacagacgtgactgtcttgttcttaattttcatggaagtaagaatgcaaaatattaatagggaatagtattccctattagtatgacatttacttttggttattagtaggtagtcattaacatgtttaagagtttccgctattcctgttttatagtgttattgctagaagtggttcctgaattttataaaatgccttttcagcatctattgataaaattgtatgattttttttctctttaatttgttgatgtaatgaattagaatggtaggcatttgatgtggaaccaaacttgtatttctggaacaaatactacttggtcattgtgaaataatgatttgctacatgagtggattttatttaccagtatttaatttagaattattgcattttcattccaaagtaaaattgtattttgtccttctgatgctatctttatcaagttttgttattgaagttgtgctagctttaaaaaaatatgaatatgtgagttttcaatttttttcctgtggtctggaataatttaaatagcattagaattatttgtttgttaaaagttagctaggacaaagtgtaaaacaatctaatcctgatgacacttttaatagtagatttttaatcagctttgtgatttctttaatagttattggtttattcaggctttttattaaaaaggtatatacattctctgtgacatacaaagttaaaagttctctattattgctgattgtactggttgttgcttgttgactgtactattcagatggctttatgcttttgtgtattttatgtcacctagatctaattctgaaaacattgtaataaaataattagctataatggt

SEQ ID NO: 17279 - DNA, 3060 bp, Homo sapiens
tacctacagggaggcagataattttaaaataaagtaaataaaattatatttatagatggaccttttttcggagaagcactgttgaaatttatacacacacacacacacagagacccttgagtacacatacacacacacacacacagacacacacacacacacacacacacacacacacacagagagataaggaacaaaagtgttttctgttgttttggggaagtgaaatatgtggttggtaggaagaggtaccaatgacttccaaacatgtgattccgtcttaaaagttttccatttttaccctgtcccccttccctttgctttcagaagttgacatttctattcattgcttttcttgttaagataatctctttactcccctgtgagtgattcactgccttgtcattattacgatagatgtgtttgtattgttttttttctgatgatactgatgttgatgaatttttaattttatttgatgtggtagagttgggaggtttcagggttttttcccctcttttactttccattgaggaagggaatgagctcctttctcctctccttcagccaatcattatcaaatgttccttcagccctgcagttgccccaaataaccttttttcagcatcctctgtcctcagtcatgccagtctggacatgctctgttgtgccctgtgacaaaactgctcagtattcctattgcttttactgtgttttaggtactgtgaagggatcaaaaaaccaaacagaagcaagggagtatcagactatgatgatgctggagtggacttctgttcagggaacattttgcattcaggctgtttcttctatcactggggtttcccatgttgcagcacttctgggtcgttgcaattttgcatctaggagttagtttgatcgagttattctcttttttcaagtcacttttgttataggtctccccctaggcctgtctctcccttagcccaaaagatctgaactggaagcagaggttgagattctgcctcccaggagagggatttacctgccccctagtaccagataggtttagggcagtgatctctacagcaatcagttcagtgtcctggttgtccctgctcccatttacagatgtttgggcagcattgatagaagtatggaggggttcaagacagagcccacctgatcaagatcatcagctaccttcaaattattgacctggacagggtccaagtctgatagtaaccttttacaagaaagaacagggatgggaatggaaagagatagccttgatccacagtattgtacctgcattttctaccaccctaaaattgtgtgagacttctcccattgttaacagattgcatggacaatcttccctggcttctttctttccctctctctttcttctttctcctgccatcctagcacaggaggatttttggtattgatatagttaaagctgttctggcactcaaagaaggccgtgtttccaacatcctctcatcccaggacatttggggcaagtgagttaggggcccaggggcaattttccctctgaataacgtgtctgaggcagggatgctaccctcaggctcgcttttggccagctttttgcttgggaaaatctaacttctttcacaaggaggcaggcttcctatggatgttggagtacctgtttttcctccacacatagcccttttcatggatagaccttgaacaacaaaaagggtataagggaataaggatgaactctgctgtgaagagcaagccactgtagtgaggaatgtggagactgggagtctgtcctaaaccccatgggagaagacttcatcatgacaggacttcagcttaccaagcagcagccatagctgtgtggaggcttcagcatagctagcatgtttactgctctatgcctcctgatccagaccaggcattgcccagcctgggaatcttttctttgtgggaatcaaattacaagctatttaagtttatattccatcacaaccaagtcagacttgtattataagtcaaggatgagcctgatctggggagagggccggggctcgggactggccaccactgttcagcacatgacctaactacgtaagcctctttggcaagggtcctggtgcccagcacccaggctaaaatatcctgtctggcagagtgttttggtagctatgcaggcctcccttcagtgtacctctttttccaacttctcactcctccttactaggcttggccttgacatgcttcttcgagggttggcagcacaccgggaggggatgcttggacaagtttctgggcctacatttcttgactaggccctctcatttcctccctccttggggcttctgcccagggctccaggatcagggatattacttctcaacccgcacttctcctctactgaacccactggcatcacctgatgccactaatttgtgaacaacaagaaatcatttccccattggttggagtattccctcagcctatagcatcaaagcagaccagtggccaacagccccaaggggagcccaattaaatacctgggttcagtatcctaacctgttatgtcctgacagcaatggtaaccccagtaattctgtaatgttgtaatttccgcatggccctgagctcccttttcctcaactcagtgaggccaggatttgctctccaaaaggctttgctagtgtgttcaatgggacctgctgtggggagtcctaagacagacatctaattattctctctttttccccccctctctatgtgtatatttctaatggatctataagaacagcaacaagagagttctaacaattctagtgtgaagccaaatagtgatcttttagtgctttggggatggggtgggctggggtggatggatgggcaacagtgactttgattacccttgctgctctgcatttgccagtttattcttttgtttcttttatctgactgactctgtcaaacaagtgtcaaagttgtgtgttaaaaaatgtttaacaaaaaaaatgttgtaatgacacaaagccttatgaaaatatttatggagttcaataaaagaagtaaaaagac

SEQ ID NO: 17280 - DNA, 4762 bp, Homo sapiens
ttattatcaattctggagtagggacacggggcctgagcatgtgaatggggatcaggggttgggcagaagggtgggggggtgggggttgttgtttaacttgaaaaccctttgggccaaggaaaactcctgtgagttttcaccttggttttcccacttgcctcttctgccatctatggccacgttcaactcaagtgcatctgcccagggaggctgctgctgctactgcactccagtttttgctttcgaggtttcttcttgtgacccacgctgggtttgggatgctgtaattttgtgcctattccagttgccaagttagtgattatatatatatatatatatatatatatatatatatatatatatacacacacacacacacacacacacacacacatacatacacacacacacacaaacacacatgcacacacatatatagcatgcatccttgacacaggctaaacctttagtgccccctgcccctttcccccaatgaatgatgaaccactgattagcagccaagtctgcattgcctcccgcttggggaagtggggcttatttgctattagcaatgtgaaattatggtacagatcctccccacccctattccttttggcctggcatagctgccatcattatatcagatgactataagctattcatcccagctagctgtccttagagaggatcaagtagcgtgtgtctcacagcctatcgctgtggactttggcatcatgaccagatgggggccttttaactgtcctgccatagcttgggttaaagacaaaaatgctaatccccttgatggagtgataaaattcatccatttgcaaacagaagacaaaacaaggttctgttgtggacactgccatagagtgttgagctccggaatgataggattttttttccttcttttaagcttgtgactacctgagttgcagatgcttttgaatttttgttcttttttcctctaaaggaaattttcataatctcatcacaaggaacacggtcttttaattgagataagggaagagaagcaacctaaattaggcttgactataggggctggggtttttgtggagtgtaggggaaagatagaaaatgagggtccatttatcacagccagcaagaaaggggatttcagaccatgcagagcttaaggtatctcagtttcttaaaagggaaaactcccttctcaagcctcccaacacaaaatgttccttaagccttgcccatcccatcatttggactctgtaataaggccccaggtttgcactcccaagacaggataccaaaggcatctcagctgctgttctgggccctttaaagagcttttatcttccaattagccgagtccttagcatcatcaaatgacagggcttcttggcagttgcagccctttatggaatgaatggcaccctcccttctcctgcatccatgcagttttcatgttaaactaggttggaaatactggtggggaagagcttgctgtcaggaagacattggaacaggctaatcttgccaagctcaacctctcattaatcacctgtaggagagggttccttttacatgtctttattggaaatggcatatggaacattttttgcttggctgtgttcactcaaattatgattattgcaccctcgccctcacatcccaccatctccatgcctgttgagagaagaagtcaacagggttcttgccattcctgagatatggcaatttagcttgggaacagatgctgtttgccccctaagtcaaggtgactttgtgggcaaactgtttcttggccaggggatgtgtccatgctggtctttgtcaccatttctcagattggggttggcccagtgcccttactcacaaatagcagacctggctggtagaagctgcacccctggaagcaccacatgaatttgcatggcactaacaccaccactcaagggacccagaccagctcttcaggctgactttggctacagatacattgtgaagaaatgtatctgttgtggagctggagaatgaaagagggtgaggaaggccctccttaccccaagcacagcattccaagagagaagtgcccaaattccaactttctggcctcttaccaaagctgctctgggatggtggggctgaaattggcctggctatttggcaggaagtaaacactcaccaaatgcctttacaacagggaagaacccacctcttgcctcttctttcagggcagcttgagctcctgtctacatgtggactgtgccagccacagcaggcggtagagccatcaccagcctccagaccctgctggagaagggccaccagcctatctgggaagagaaaaaggaggtggccaacctttggctaagggctgagagctgccctcaggatcaggaaggcagcatgaggcattgtctctgaggggcactggcatagccctgacacactttgttgggctttggaaggtcacacaccacagagtagggcctggggctgagtgagagttcatggtttggacagccttgctgcctgcaagtcccttcactgccctagccagcccaggaataggatccttaccacctgaagtggggcagccaggatatgtggctgcagaagcaggttcctttgaatttctagagctaagcagtttgtggctgaaacccaatggcagcctaggggaggaaggaagacctgtctggggacccatggtgttgacagcacagggtgacattgggagagccagccaagcttcaggcctgtttccaaacacagactagtgctggcttgggtggcagcaaatacaccccagaccactaaaactgttgatatcatgtccacacctccaagagtactactagatgaacaacatgtctccattgcaaggtcctggaataatgcttttggatgtgattttaagggaaaatgggacttagtggaagtagctgccttcatcttattacccaataggcctagtgccagacagctgtgatcctgagaattcccagatgagactggtccttggaggaccagtgaatgtggatagagaaggccacctagtaggcctctcccagggccaggatgccagtttcttggtgctttagagtctccaaggaagcactgccttggggcccagttcaagccagccctacctatctggcctcagcttgggtaccaggccacaagactgcccggataatgggttcagtaaacaccagtctctctccctccttagtcctatgccaagaagggaagtagcttcacacactcaggaggctgggtgtgtacccttcatcctgctgccagcagctttccttacctgtgccagtgccaccaccccacctgccctcagcccccaggcccagttgctagagggaggcatggggtttagcagggagacttcaagtttacccatgtgtatgttgcattcaagttgtttttaatatatatatatatatatatcaaaagtcaattatctatttttatattgtttgcattttatattcatggaaaacaatgtttatcaattgttcttttctgatttatttttaagcggtgctgtttacagttttaaacaaaacaaagatgacacaaaaattgctgctgcttgtgcagagggctggcatctcaactgcctagggccctccctctttcccctctccctaccttagctgtaccacactgtccgttccctccccccatgatagggacagcagaagatgcccaggtactgaagacaaacgccaagtgactcaggcgtgtgggacctggtagacagcttgtcattttctggctttattttatgtttttctttcttttgaacccttcttccccatgtctagaccctctgagagtactcatgtgtcttattttttttcctcgttatgttttgtgctttagttttgaaatcagagtgcccatgttgtgctatttgtcttgttgagtttctccaaaggagcattttgggaacattctccacccaatggggaaggaagggggtttcaaccatgtcccctttccccaagaagctgtgggagacagatgacaatgatgcttgcactatcaggaatttaccatctcgttgaggaaacccttgcataggacttcctaggagctcagttgattgtgacattttcccagaagagaggctttggggaactccttcacccctcttgctgctttgggggaatctcctcccctaccaccattccccctcccctgccctgctccagctcacacgtggatggtactttggggaacagtgactttcagggtgatggcttgctggcctgatccctgactttccaatcctatagtcactccaaagaagaaaatccacatggtatgtatatgtgtgagggttgggtctattgagaggtgggactttaattattgttattattattggtgcttatttttcctgctgtatatgggggtgggggtgggggggaataaaacaggaatgtatatttaggtcatgttaaataaaatggctggaggaaggagggaagaaattaggaactgcagtacatcatcaccccaggtgtaagagttatttctctcccagtgcagaaaggggagtgtggcccctggctgtacctgagcttcctcttctccatccctgagacatcacagaatcacccgggttctgacctctccacttctagctctcactgacatctggatatcttgatgcactgcctgtttgtaacaacatatacttctttgctgaatgctaataaacttctgggttcaagagggaacccctcagtca

SEQ ID NO: 17281 - DNA, 139 bp, Homo sapiens
tcttgcagtctccccaggaacttatgatgcctccgaaaaccacctggggactcacgtagctggagagcattacagcctcatccacttacctggagctgctctcctgtattatcctccacaataaaattctccagaaaat

SEQ ID NO: 17282 - DNA, 455 bp, Homo sapiens
gttagttactcatcttccatgctaggtatacctacagcagctacaatgattcttgtcccagagagggctatgctgcttttccaattggtttaagtgggtgaagccagggcacccctctccccacttaagtctggaagggaattactttactgattaagtgaccaatatgttcatattaagcagtacagagtgtaggcaagagaaagaatatgttattgttctaaaatgggatttaactatagaaatgttgcctctcagctgagacacatattaagctggttctactgtctgttttccttaatgatcgacctgccctattttctatcctcactgcagtaatgtgaaagtgaagtggaaatattgtcacaatggtcaataatgacccttttgagggtatggagagatggtatacagcaggtaactgtgaattgcagaataaattgaaagaaaatttt

SEQ ID NO: 17283 - DNA, 1401 bp, Homo sapiens
agaaagggagagcacatgaagctttgctaattataacccctcaccttgaccagagtcattgatgtcctgatgtgaaacaacccttgcccaaccccacgaagtctcctatttaatgtgatggaagcacaacccctctctcactttgctcctatttctttctgctcttgggatttctggtttaggaagagatgtggttcaggtgctaaacagtgtgtctgatgatcccttctctcccactcacatttcaacccctgcccttgtttggagctaagggaagggcaaaaggctcagatatgattctctatctcttgtgcctgaggcctggagcctaaggagctgtagggtctgaggggcaggggaggcccatatcttgtttcaggtaaaggacccagtatttcccctccttgtacttttgccttaggttctcaagggacaatagtcttcatgttggattctccaacaggctgggtgcatgtatccccctactcctaccctcatctcatccttaaggcccagaggtagcttggacaagccctccttttcataatcatttgggaggcatggctgtaattctttagctttctccacttctgtctcccacatatactaaaattcttaggtactaggctgtgtgtcttgggatcttaagatcaatgaacctttccccaatatctagtctttgcaaattctagtagaagatttccacagtgaaatcagtgagccagaccaactctacatctcctgcctaacctactgcctaagtcattagggctgagggctcggctgtaggggcttccttaggctgagagtgcccccaggctgacatctgtgttggcttttgttcagaaccattactctggcacatgctcaatggtatattgcagggaggagaggagtagatttagatttgagtaaatgccaatcactttacacatgaaggtgggtgggactttccttccattcatcccttgctctcttggatctgaactcttctggagcctcagctcaggatagctgctggccactcctgtcctgtggattgtgcaggtggcctttcctcccaaaagaaaaggcatcaggctccccaagccccacagctctcctttccaccaaagccaggtttcctggtaaggtcactcgaagataagggatggggatgggggctgactgacaaaaaattttagccccaggtctcagtacctggctggggagggggatatttttccttccttaagtagttttacattgccacagtgtgtatgtgttcactatataaaatgttcctctgctctttgaaagtaagagtgttgtgtctgtacaaatccttttaacatgcattcattggagtaaattctgagtatctactgtgtattggataatacaaaagatgtaatgtcattt

SEQ ID NO: 17284 - DNA, 187 bp, Homo sapiens
tggccatccctggtgcaagtgttcatccagccgtgccagggcaacagcccaccccctagtacaactgatgctccctgagacaacctgggagacagcctggatcagccacatcaactcagttgtccaccacaggggaattttgaatgtcttttgtttttgttttgttttgaaaaataataaacaggca

SEQ ID NO: 17285 - DNA, 525 bp, Homo sapiens
aaatgccccattaggccaggatctgctgacataattgcctagtcagtccttgccttctgcatggccttcttccctgctacctctcttcctggatagcccaaagtgtccgcctaccaacactggagccgctgggagtcactggctttgccctggaatttgccagatgcatctcaagtaagccagctgctggatttggctctgggcccttctagtatctctgccgggggcttctggtactcctctctaaataccagagggaagatgcccatagcactaggacttggtcatcatgcctacagacactattcaactttggcatcttgccaccagaagacccgagggaggctcagctctgccagctcagaggaccagctatatccaggatcatttctctttcttcagggccagacagcttttaattgaaattgttatttcacaggccagggttcagttctgctcctccactataagtctaatgttctgactctctcctggtgctcaataaatatctaatcataacagcaa

SEQ ID NO: 17286 - DNA, 2453 bp, Homo sapiens
gtctcttgggcccctggcagccttgcccagttgttctctctggactctgttcctataccacaacagcagcaggggcctgaaatgtgatgtccacaagagctaataccctacagatggggcatatcctatcccatcccaccagaggattgattctccatttcacaaggactgatctggagcatttcttgcttcccttttgtagtctggggagccagattccacattcatgggactaccagacatgttcctagctcaacttgattatagagaagaggagagaggacagtgaatggggtagggttttcatgtctgcatttttggtcaggtaagcctctcaaaattgtgttggcacatctacctagcactttagggacaaaatcaaacccttctccccttttagctcctccacactgtctccctcctcaacacacacacacacacatacacacacatatacatagacacacaaacacacacacacacattaatatctatcttgggggaggcctcgtgccataattcccaagttcatgtctcagactgctgcattgcagcatgaggcagggcaaacactttccctctagatccctggggcctcaccctgtatttgaggttctcaccaccctcagcagggagaagggctgaagttcgccattttggaaccttacagaacatttctgagccaaagtaatcttccttctggggcctgagttccccaaactaccccacagcagtccctcaaagacagccctcaatccatgtagggacatctgagtatgcctctttctattgaaatgtcaattcaatcccagctttctcaccaccgttcccctttgattctttctcaattgtctttttgcctttagctcccacctatacatctcatgctcagagaaaaacaagttccttagaggttgtattctttattctccaagaatctgtctgaaacttgtacagctagttcctgtcccacaactattaagtggtttattaagtacattaggcagaatgtgcacttcatcaccaggttctagctctggcaaaggagtgctgtctacagcaagatttttgcttttagaattttattaactacatcttttgggttcatccatctacaaacactgattaagggcccctggggcaaccaattgatcagattactaaaaggacttgggaaaaagcaaaaaggtcccattgtactggactgaggattagaagcaattgaaatacaagcctgtaccaagcaagcagcctggccccacacaggtattagcaaatatgtggtaaccaaggttttaggccttggcctttaggtttcctgttttttttttgtttttgtttttgtttttgtttttctgcaacaggttattcttatctcactggctttcactgatcatgtttagaccttctggtagaagaaataatatccagacaggggatgatttggcttcagcaggctgcaggtgttcaaaggttgccatgtggctggcagtggttcaagcccacatttgacactgctgctctagaggaaagataatgatggtaacacagtaataataataataataacaaaaatatgataaagtgaaagagtaagacttcttcagtgtgcttgctcatggcatgaatgctatgtggacagcccaagccatacccagaatcaccttaattccaactttttgaggttcagcaattggaggtggcaattggctttgcattttaaagtatttcgggtaaaggtgaagtgaaggattttcgtctttataatttctgtttggccatggcaaataccatagttgagtatttgcttcaggagagttctttttacagttttacttttcaatgctgaggcatatttctttgagcactgtgcttttatgtgtctttctacaaaggggttattggtcagtggaagaacaaagtacacttgataaaaacattttcaacatacattgagcctaaacagcagttaagttgtctctaaatgaactagcaaaaaaaaaaaatgtagtttttgtttgtaaggaaggggaggtatttcctgagaatgaatttttttttttttggattactgtttttctctccatataccttgacttggattttgacaggagggagcctgggaaaataattttttcctccaagattctcagatccaggttaggaaaggattcagcactacagcatacccctctacaacatacagccctgtcacattgagatcataatccctcctgtcccactcctctctaccaaccccaccctactagctaggtcttcagtgttttacattgaatattggtacattttaattattttttctcataaatgggttatttatagaaattttgttaactcttgagccatatgcatgtgtagatactggcagggctatgtttgtttatgatgctctgcaaacatttcatattggccaataaacagaaatatatcca

SEQ ID NO: 17287 - DNA, 4291 bp, Homo sapiens
gttttaaaagccttggcctcagaggaccctttccaggttctgaaagagtctttcttcttcaaacctttgtgtgcggagtcattttgtgttgaagagcagctccttcctagccttgcactttcagactctctctgggaggccataaaataaggagcatatgtcctagacaggtgtttatatctcctttgtattctgtcttcatcccctcagaaggtctgttttgagttcctataacactgtgaagagctggactccctcaagccagactctgccaaaaccaagatatccacttacctgagttgaagaggggagctcagttttcaactcttccctgaacttcctgcttcctcagagggccattgaactctgagagatttggggctaaagactgatctcaggggtcttaccttgaactgaaggccacttgagttggggccattgcttaccttggttggaagggaatagaaatgtttgctgaacattggagaatctcaacatgtctcctactgaggatatggacactggtgccatgtcagcgctctggtgctgcagtatgttgccaagagcccgtctgctcctgcgaggctatgagtgggatgagtgatgcccccacagcacctccatgtggacttaggaaggtggccttcctgctgttacatgcagccacttaggacaaatctgcaaagcatgttttgcatgtaaaagcctaggtctatttggattattctttctccttttttttgacagcttcctgtcaagcaatcaagaaacaaacaaaagctgaacacatttctttttaaaaaaaggagactgtgtttggtcctgtaggagttctattttggggtcaaatgctagaaaaattgttaaggtggattgaggccaggcagctgtcactgctgcttcatgtttgccttctgcacataaactcttttatctcctgaaaaaagcagttcttaacccagtgtccatggactcagaaactccatgatgcccctgagatggtatgcacaattccatgacaatatgccctttctggggagatagtccataatgttctgctaaatttcaaatgggctcgtgacccaaaaaagtcaagaaccacagcacttgagtaaaatactctttttacaatccatataagcccttgattggaagggcttttcaaaatcatttagtctaacaactgcccagtttccagtcgggggaactgaggcagagcaaggtagtgatcacaccagtacaagatctcaggtcccaggctcctatgcaagttttttttccccattatatcacacttatctagcaagggaccttgtggtttgtggctttagtggccatcatttctgggggttggcttttaccctttttcttgaatatttgccaccaagtgaaaaatgttaggacataaacccttgccaggtccctttcatttgctatctctattattggaaaggacctaaaaattggtgtaatggggcagaaatctgaggaatggacatttctaattcctgtttgttgaagggaagttgctggaaagagcatcagtacttgtttctatgcagatgcctgggccgtagcttgtctgtagcgtctgtataattataatgttgcccagtgtgagggaaagagctttcctacttgcactcttctaccaaggccctgttagtgcactgattatagtactgacagataaacctagataaagagatagagagtgagtacatgcacactcatgtgcaaacccactcagagatgcatttggaacagtgctactgaaaggcagtagtcattttcaagactgaattccaaacatggtttattggtgagttaggaacatgtaaggccaagtacactgagagcctttttgaaagtaattgagtggaaacttgatgccattctaaatcaaggcatatccaggtggcccggttgaactcactccactgtacccagtctcaaaggccaggttgctaagaaaccaggagtaaaagagtcaagtgaccatcatttcacctgctgcttgcccccaatagtagtctctgtgaggccttactgacctcacctaggaagtgatttttgagcccttgtttcagggctgtggcctccctgctctatcctgaataaagcagacaggtgtgcagattttggccatgaaagcatggctaatagggccacagtccctttaaagaaacatggtttgactctggttttcttgggggaaaataccacaatcaccgatgcaaacattggaagattattgagagccctagaaagctgctgtgatcccagtagaaaatatgtcccagaaatgtcatgagattgctgtgtgttgcctgggacacagatcaagggcctatcttggagagctggggaccagcagtctgcctggaggccagggagcagtggctgagtagctctgcctttgctctggtctataccttaagaatgccaaagaatgaatttcaacgcctgcctttggcactctgacttaaagtgcaaaaagcttctgtggcgaggcatgctatcatggaatgagactggcttgccctaggcttaatggatgggcagtcattttgcagaggctatgggaagagggtgataatagaagagtggcagctataggaaattatcaacataccttggccagcaagttagagaatctggcaatggatgaactgaaagtgatgaactggcagggataacaaagaacctaacatttattaagcacgtatttattaactgctcagtgtttcatattcatgcaagtattctcattttacagagaaagaaattatggcccagggggctaaagtaaacaactcaagggcacatagaaagtaaataaaaggactgtgatttgaatccaggccactcttagcccatgctgttttccctttgccacactgtggtaggtgtttgaacagaggccacattactagagttggcatgactcttgactcttgcctgcctaacaaaatattgaaaggcaaacatttgaaggagggagggggtgcaggttcagtttatatggaaatgcaaactgggctggaagatattcctgagttaggctttctcttcatattcagcttgcacatttggtaatgtttttaagatgatcatctaattttattttgtgaagtgaaggatttgtgttttagttggcagttgttaagtccttggcttgccatttttcaaaaagtaaaaaggtcctcacaggtgtctccatacttcgccaaggttgtagcatgggcagtttcagtttcagcctaagagactggtgacatccacaaatgcagttttagaagcagaaaaggtcttggtgcctctgcagtacttgatgtattggggtcaaatctctacaaatttttctgtggtgatagcaaaatcaagagatggcttacaaaaagaaatattgaatttttatttttgaagtttttgttttttaaaaggttgggggtgttcagccactgagggacaaaacttagcatctaatttcaattatagtgtcatgcagagtatttctaaagtaattggttatcatgggaaagtattctcttttcaagaagttctttgattctgtaataactagaacaaataaagtagtaaaagaagaaatagttctgtgactaggaaaaaattgcttttgagagaacatagatcaattatactacttctaaggtagctgcagataagtggccttgacacattacaagcctggaaaaaaacatcagaaataataaaaaatttcagagagaatcaagatacctttttttttcttttttttttcttttttttattatactctaagttttagggtacatgtgcacattgtgcaggttagttacatatgtatacatgtgccatgctggtgcgctgcacccactaatgtgtcatctagcattaggtatatctcccagtgctatccctcccccctcccccgaccccaccacagtccccagagtgtgatattccccttcctgtgtccatgtgatctcattgttcaattcccacctatgagtgagaatatgcggtgtttggttttttgttcttgcgatagtttactgagaatgatggtttccaatttcatccatgtccctacaaaggatatgaactcatcattttttatggctgcatagtattccatggtgtatatgtgccacattttcttaatccagtctatcattgttggacatttgggttggttccaagtctttgctattgtgaatagtgccgcaataaacatacgtgtgcatgtgtctttatagcagcatgatttatactcatttgggtatat

SEQ ID NO: 17288 - DNA, 445 bp, Homo sapiens
agaccaaggccgtttactcctggtctgattattttccccatctgaaatccacaatactgcaggagccctcttgaaattaacaatggaaataaaaccaatcagtcagttagcctaaacctattgattcctcgtgattatttccaatgtgaaaacagttgtgtatgattgcattaaaaatcatatcatcttttagaggttagaaaagggaaaactaaactttctaaatgctacttgagattgcagtaagaagatacgttttctaacctgaaagttaaatcgcatttgttttcttcagtagaatgggaatgtgttgctgttacttgtaatgtcaagtttatctgttaaatatgtccaaaaggcaaaatcatttttgttgcatgttatgggtcgatgttcctgtaattgcagtgccgtaaaagcttattaaagttgttcttttggtttt

SEQ ID NO: 17289 - DNA, 1081 bp, Homo sapiens
ctcttttctgccctttctttgcagctactggtgagatagtcccaagaaacagggaagagcctaggggagaggtgccctgacggcactttggtgccagcattgaggaaaacaatggacaaaataaaaagcccatcttctgataactgcgtgtgcaccaactactctgttttgaaggctctgggatgcatgtctctccttctctagctgtcaaacagccccatctcccggcattgagccccatcttctggcattgagtcctgcttcctacaggagtaggactggggccttgagagccagtgggctttgagtttaagctccaccaacttcaagccatgtgactttggggcaatcagtcacctctgagcctcctttcttcttctataaaatgagactaacaatctgtctcttgcttacctcaaaggccgttgggaagatcaaacaatattggatgtgattgaactttataaactggagagctacaccattttcttctccaaccattttacccatttcctgtccctgagcaaacaacgcccgaaataccctctgctacccactagccctcactcagtttctgcctcacaaagctgtaacagaatgggttgggctcaggcctaattttctctgtcattccctcagcaacttgcctatacttgtgtggccctataattctggcctttgtttgagagtcagccagcctgctcaggatgaaaatgaggcgcctggcttttagcagccataaagaactctccttctgaatggcaagtctctcagactcttggtctaatggctgttgcaatgacaggctacaaaatttggctcacatccctctcattccatccctcttgggtgggtgccatttggtccagtgatttacctgcattacgttggtcaatttggtctacaacatcctgcgtgtttactgcagtgtgagctgctgcctctatcctgggtgcctgcctcatgtgatgatttgtatacagtggccaaagacatgcttctgcttttctgctgtctttgttacttcttgtgccagagattacgttttccctgagcttccataaagtgtttttaaacagtc

SEQ ID NO: 17290 - DNA, 361 bp, Homo sapiens
cacgggaagccgggaagtgagagaaaaggggatgagtgcagggcagaggtgagggaacccaatagtgatacctggtaaggtgcttcttcctcttttccaggctctggagagaagccctcaccctgagggttgcagggaggcagggatatcatgggtgacctcatctctcataaccccttcagttgccgactctttttagccaatgccaatcttctactcctttctcgttgtttctgttccttcctggggccattggtcctacaatcttcctgaaaatcttccccagtcctctttccctgtcccatttcccccacagcctcctatagcatgtgtttctctacccagaccagagcattcagct

SEQ ID NO: 17291 - DNA, 721 bp, Homo sapiens
aaagttgcagcccacagcccttcatgtggactctgtcatgacatgctaactagacttcaggggagccacttctgttttcagcccctccctggaatagtgagttgggaggatggggagacagctaaccaactgcattacccaaaccatattgcacttttagttccctagttttctaggtgagcttcattccctgaaaggaggatgatgatatctaggcataacctagcctgtgaggaacctagttaggaaagacaactgacatttattgaatatcatgcactagtcccttacatatgtcatattttaattatagaaatcagtagcaaaaagaatcttggggattttccatctgacttccctggccatcttatcccatccttgcactaccagaagattcatacacttttgagactccagtgagacgctgttttcaccccttcctcctcctagcctctctcccaaaaagtaaaacacaatgctgaagaaatattggtgtgacttttgaatgttaccgattggatgtaaaatgctatcgagggaagaaaaagctcttccaaagagaggagccactggaaggaacagagcaatactataccttcctcgcaactacctgtgatgtctgaccagaacattagcaaggccaaggaactttaaccacagtataactaagaaatggcatagagtgaggggcactgaaagaaactgcccgttcccctaggag

SEQ ID NO: 17292 - DNA, 154 bp, Homo sapiens
gcaagctcatggccacatgaagaagatacattgtcccgagatgctgactgtttaaatttttgccagagtttctcttgagcttttgtttctgtttgctcagaccctgttttcatgttgttgaataaactttctaaaataaaagcatgctgaattt

SEQ ID NO: 17293 - DNA, 228 bp, Homo sapiens
catcgtcacacctaaatgctgtctggtcccctgcacaataatggagagtactcctgaccccagtgacagctagccctcccctgtgatggtggtggtggatactaatacagttctgtacgatgtgaaggatgtgtctttgctatttcttgtctattttaacccgtctgcttctaaatgatgtctagctgcttaccaactttaaaaaatgatattaaaagaaagtagaaa

SEQ ID NO: 17294 - DNA, 78 bp, Homo sapiens
gagcccctctcaccacctgccctctactttcctgctgaaatgacattggtttttacactaagcctctctctgtctttg

SEQ ID NO: 17295 - DNA, 327 bp, Homo sapiens
accccaatcctctgacagaagaaccccagggtcctgtagccctaagtggtactaactttccttcattcaacccacctgcgtctcatactcacctcaccccactgtggctgatttggaattttgtgcccccatgtaagcaccccttcatttggcattccccacttgagaattacccttttgccccgaacatgtttttcttctccctcagtctggcccttccttttcgcaggattcttcctccctccctctttccctcccttcctctttccatctaccctccgattgttcctgaaccgatgagaaataaagtttctgttgataatcatc

SEQ ID NO: 17296 - DNA, 1292 bp, Homo sapiens
gctcgtgtgccatccatatccatctttcacatcaatgtctgtcctgtggccatgtccctcagggtgacaggcccaggaaccaatgctactcattctgaagggccctgactgctcctttccgctcacccattccctgccttctctaggaaccctggcttttatcttcttccgtaccacttgacaaccatggggccctggtcttctgtactcaggggctggtctcccagtgatgggcaaaagccagcttgcccgttttctttatgcttcagagtaaacccctccttctgggtccagactctgggtggagtgttaatagctctggtgatcctgttggctttgggtttcctgacccatcccgcataggtagagcctcttgttcctaggcatgacctagggaaaaacccagctgccttctctgccctgtgcccactcccttctctactcttccccagcaccatgccaaaaggtcttatctgaaaggtaagaaataaacaatgaaagcgatgaggggaccatttacataaaacacagagcttagacactcttcccctcctatgaaataattggttgttggcaccatctcaccaccgcatatccctcaccccctcggcaagcaccaatccttggtgctgccgtttttaaaatcttccaaatgcctttttttcctcagaggcagagaatgactaagtacggggagcagactcctgttgtgcagactcctgtccccttggtttctgtgtttgtctctctgccatcttaggttgccatgagccatggtgtcaacatgcttagccccctctgtaactgcctccctttagttcaatggacagacctcccaaggcaaaaactaccttctgacttgggttgaggctgggttcccctctattgttcccctatcataagagctaggccaagcctatgggaccttgagtcatgcaggatgggatctgtggtcaaaggacaggcgaggagctgtgggcgcagggcctgccgccactgcctacatcttctctcttccccatcttgcattggaggtcccagaaaacaattagcttctggcaaagggggtacccacttctttccctgttgactttgctgtttcccaggctcctttttgtgtttttataactgtcaccagttagccactgtttaaattgtatatattgttctgaggcgcctggcctgtcccttcagtgagccatgcccacccttgtgttgtagtgagaagctgttgtcacgactaaccttctgtctctgaaattgtttgtttcaaataaagagttaaaattgtc

SEQ ID NO: 17297 - DNA, 448 bp, Homo sapiens
ggccggaatccgggctcccctttcgcccacagtctgacttccccgcattccaggctcctccctccctctgccggctctggctctccccaatatcctcgctcccgggactcactggcagccccagcaccaccaggtctcccgggaagccaccctcccagctctgaggactgcaccattgctgctccttagctgccaagccccatcctgccgcccgaggtggctgcctggagccccactgcccttctcatttggaaactaaaacttcatcttccccaagtgcggggagtacaaggcatggcgtagagggtgctgccccatgaagccacagcccaggcctccagctcagcagtgactgtggccatggtccccaagacctctatatttgctcttttatttttatgtctaaaatcctgcttaaaacttttcaataaacaagatcgtcaggacc

SEQ ID NO: 17298 - DNA, 2718 bp, Homo sapiens
gtgctggggccagatggccacccagaacacacccttcttttgcatcccccgcccctgctattgctgccatacctgccccatttgctgaccaggacttcagggagtttcagacctgcagaacctgaagaagacctgcagaattccagaccatcttgcaaccgtgaccagagagcgacgtgtgcccaaccagggccacctgggaaaggagggatcagcaatagctgccctcttggcatgtactctgctcagtccggccacgagctggagagcaagtttctgggcctgttcccataaatgaactggtcaccctcttgtatttcccctctggttgttcctaaccctcacctctcctgcgtttcttcaccctatgttctacagttttattctctgactgacccaccaggacttcacccaatgcctcactgatctgccccaatgagcaagaggacaggctaccctgaactcctaaagccactgaggccagttgctagatataatcgatggtgagcaggatggtatccagaaatgtccctagaatcctacactcatttcatgccacacctccagcagagggcctggaagaggacccgacatctagcccagtgagagtgtgcaaagccacatgtcaaatggacaacttgacggagatttgcccttgactgactgtgcaggctggttccacttacagcacttgagtttacctttgcacagattcctgtatcagggctcttggactgacttgccacacatctggagccctttcctctcaccacattgccctcctgggcacccccggtggacagcgcccaacattgcaggctccacaactttccttgatgttgcctaaagggtagccagttagggttccggagaggagaaggaggaagaagaggaggaggagaaagaagcagcaacgatcattctgccattgtaaagagtgactctttccttagggatggtggtcttctccccttgccaggccttggactgcagcccccagtcaaaggtctttgcaggacactttctatccttggagttgcagaggaggcctgattggccattccttctgggacagacagagagagggcccatggcctgctctgagctcccttcaatttcaaggaacccttagttctgagaggagagaggaaggctgcacctaccgtggcctcacagctgggacccctcatgggggccaacccctggcctgctgctgtgcttcagtgacacagtaaagcttaagagggtggctgcctcctaggaactcctgggacttctaggtacaaactcaggtgcccttataaagagacccactgcttgccttgagtccagaaagcactgcttctgcagtgaaaaacacacacttactatgtcagttttggccataaaatgccagccaaatccactgctggcctgaactgcccctggacactggactttctgcacagtgactggcagcagagcaagtgcagccagggtttgtggccaaagggaagaaagcatagtaaattcaacctctgttcctcatgggagtctgaccgataatctcaggcggaccttaggatcttgggcctggaggcaagagaaaaaagctggaggaagaggagtcgcagagaaacccagtcctctgactggtttctggtgaggtctctattcatcagtgggaggtaagatgcccttttcattagcgcttttgtttctcagcctggggatcagtggatttggattcctataacctgttgctaccttttaaaaagatcccctctctccaaagagaaaagtaatacataatcattaaagaaagtttggaaaatagagaaaactatgaggacaaaaaccccccagccattcagagtcccaccacacagaggcaagcactattaacactttgctgctttcctttctagtgtgttcttgctatgtcttgtcaaagctgagatcaccctgccagttcttgatcagcaggatttaaaatggctgccacctgtgcagtcatgcatactgaataattcatttaagcattctcctaatttgttggacctttcaattgtctggttttccccatccccaccagggcaggagtaaacaactttgtaaagaaaattttgtctgtttttcagctgattttatctgatttcctcaagagtgcattccagaaggggacctgctattcttcgaggggacctgctattcttcgaggcagtggaccctgtttgctgatggtcaacactctggccctgctgccccatgtccctgtggagaagtgtgaaggacgggtgccttaaacccacacttccagggacccttcagcacaggtcctgcctgttcccatggtgcttctcaccctgaaccctcagagctacagccagggatagagcagatgagcagtgagctggtttccaccctctggggcaggaggggcttgggcttccctttgaccctcttccttcctttcccagatcttcaatatttgttgtgatgtaacagccataagagctgtaagaggaactgtgggctttgggagctttcttgggttgaaagaggggtggggggaggggatgcatgcaggggtatgaaggcagcccaaggtctcccagaggctcgggaggaaacccttttggaatacatgtgttattgttgcattactgtgttgtgaagataagaagctgctctgtatgctaaagctttctctcctcaataaaaatataaagggtgtgt

SEQ ID NO: 17299 - DNA, 357 bp, Homo sapiens
gaatgtaacctgtttattgtattttaaagtgaaactgaatatgagggaatttttgttcccataattggattctttgggaacatgaagcattcaggcttaaggcaagaaagatctcaaaaagcaacttctgccctgcaacgccccccactccatagtctggtattctgagcactagcttaatatttcttcacttgaatattcttatattttaggcatattctataaatttaactgtgttgtttcttggaaagttttgtaaaattattctggtcattcttaattttactctgaaagtgatcatctttgtatataacagttcagataagaaaattaaagttacttttctcaagtgttttc

SEQ ID NO: 17300 - DNA, 68 bp, Homo sapiens
aatgggtccctgggtgacatgtcagatctttgtacgtaattaaaaatattgtggcaggattaatagca

SEQ ID NO: 17301 - DNA, 71 bp, Homo sapiens
tgccaagtgtccctaaagatggaggaataaagccaccaattctgttgtaaataaaaataaagttacttaca

SEQ ID NO: 17302 - DNA, 537 bp, Homo sapiens
ttgacagaaagagatcaggtttccagagctgaggagtggtgcctataatgaagacagcgtgtttatgcaagcagtttgtggaatttgtgactgcagggaaaatttgaaagaaattacttcctgaaaatttccaaggggcatcaagtggcagctggcttcctggggtgaagaggcaggcaccccagagtcctcaactggacctaggggaagaaggagatatcccacatttaaagttcttatttaaaaaaacacacacacacaaatgaaatttttaatctttgaaaattatttttaagcgaattggggaggggagtattttaatcatcttaaatgaaacagatcagaagctggatgagagcagtcaccagtttgtagggcaggaggcagctgacaggcagggtttgggcctcaggaccatccaggtggagccctgggagagagggtactgatcagcagactgggaggtggggagaagtccgctggtgttgttttagtgttatatatctttggtttttttaataaaatctttgaaaacct

SEQ ID NO: 17303 - DNA, 373 bp, Homo sapiens
gggctttggttcctggcttctgggagccttttgacagctggtccctgcctcggttgattgtgcatggaactaaaatgttattgcctaatcactccaaccctgcccctttctgtcccatccttcccaagaagagagaactttttcgataaactaactactgtagaagaagtgaacacttacctggaggctcaccttgcagaaccagtgacaatcttatgagtataatgaacactcagccaggcctgtcatgattggctttatttctttcatcattcataaaagtttgcatgtgtttttattctctagatctgttaccaatatagttttctaactcctgtttggggagcaagtgttaataataacttattcctaa

SEQ ID NO: 17304 - DNA, 1507 bp, Homo sapiens
agacatcccaggagctagccagccagcagagccaaaccttggctcacacccggtttacaaccccccacccccagccctcccccgccaacccaccagcagtgtatttattgtattgagagtgcaggtctctctctctctctctctccccttctctctccccgcttcctattttctccctccacctctcctctccttcccttcctctcccccgcccacccccaccaagggcgttgtgaataatcttactaatctgtgccatttgtaggttaaaggctgcctcttctccctgtggtttgatttaaaaagcattttcattctctctttgtttactgcacaggtggtacaatttcatggtagaatcatcagaaaggagaaggatatcagatgagggaagaaacaagagagtaattgctcccctggtcctactccccagagagaaccacttttacctttttggtgtgctgcttttccaggctctcttctctccctctctctcctttgctcacccccaccccgccttcccttttaacacaccgttatagaatggttcatgtatgtggtgtttcttaacctgctttttcagcaactaaaaccaaacaaaaatcaacccattgaacttctttccatgttatcaacaggcttatgaaacgtcatcttcagtgcctgcagagtgctccagtgtatccgtggaccttaacatttctgtaatcattcccgcattgttggacattcaggtggtgcctagttctttccctgtgtttaagaccaacattgcgtgctctgtgctttgatgagtgaatccttccttgtcaagccaaatctttgctagcatcccggtggtctccttaactgcggacttgcaagatccacatatagacattttaaagacttttcctgtgtgttgccaaaaggcccccttcataagcattgtaccgatttgcactcgtgccggccagcgcagctagtaaagagtatgcccgtttcccctgcatagtctcctggtcactgtaattgatcgtgtgtgtgcgtgcgtgtgtgtgtgtgtgtgtgtgtgtgtgtgtcttggccagcttggcgggctacaaagggtgtttcgctgtcctcggtagttttgctggaaacaaacactgcttatgaccccattcccctgtgccctcttcctgtccttttccctgttgtcagaaaagtaattcagcgtcattgcaagaaaaaaaaatcacaaagcagacaagttaccagaagaaaattaaagtcaccagtaatcatttctgatgattacacacacattccagaaacattttcatgcacacctctctgatattttctagaactacctgaaacatttttgtctgtaggtctagtttttttcttatgcatatatcatatatgtatattatgatgtacagactgtttttatatctgcttttcacacatacatgtgtgtgtatatttatacacacacatattcttgaacttcatttcatgtcattaaagatacttttaaaat

SEQ ID NO: 17305 - DNA, 791 bp, Homo sapiens
agcagagtatacatggccctgaaattaactgccctagatatagttactcaaggtataagaagccttgtgttctgtatttttcttgtagtgttagttaaaacatatgtttcaaaaatataagaaaagttcaaaaactaattaatttgaccttgagttttagtagtagaatgttttcaagaaatgtacactgtggtaaatgatttaaaacactagtatagtgttgtgtagcttaatccttctgaagtctttttgtcatgtagctattaatctgtggctatgaaatgatcagaaatgctaagtgagatcaatatttgtttggaaaaaaaatcttgggaaacaacccaagggttttcgctgttgttgtttttctttttctatttttgtttacttagtcctttagctagtggatttaattttgttgtgcctgcttcattttgcaataacaatgcagtagaatttaaaacttggatgcttaagaggcctgcatatagataagaatttcaggcaaaactacatttattgttaataacagcttgttcataggctcttgtattttatgtaactgtgataaataatgaaacttagttatattgaggttattgtttgtcggtgaagtgttagtcacagtattttcaaaagtttgcacatattgttctgtgtaattgtgtaagccataattacagtgtttaattctcttttcctattacatcattcattgaaagtgatcactttaccattttgaaaagatatttcgtgttctttcactgcaaaataaaaagaataaaaatttc

SEQ ID NO: 17306 - DNA, 1229 bp, Homo sapiens
ttaagatctgaactctcagctatgtagctgatatagtgatgggcaaacaggaatcacttgcttttatgtccactttttgagtggtacttaaatgtaaagtaacaacctgaattgagtcattgctttctgaaggaatcattgtcctttctccagtttttgttccagaataaaaggaaatattttaaaagccacgttataggacctaaaaatctgatttccgtaccagttaaattggtagcatcactgttactgataatttatcatatacacttgtcaatttttcctttgttatcttaaaagatctgccttagcaatggctcctttttcatgttgatctttaaattttcccacaccataagagaggagcaaaggaaattaccagtttagactaagttacagtatgtgtttcataagtgattaaagctatatcattcccagttattagttaacacaaattcagccacattctgagtattgtttgttcacctttcagacttggtgatactggacatgtcagtgtaaataacactaaggttaggatcttctaagtgtataactgtctcctaagcccatcactgtggcacactgtagagtgagcttatagtttaattgagatatttatcttgtggaaatattaaaaagcctatgcttgtgtaagtgaaaaaaaatcacattcatttgtttaaaaatgtaaagctattttgtagaggctcagtacttttccaatgcactgttgtatgaatgcattaaaaattgtaaagtaccatgcttagaactgagaaaactgctttttgtgagccaacatagtaacaaacacaccaaacaaagtacaaagctgcttttgtaagtgtgtagatgtcaagagcagaacatatctataatatttaatgtgtgaacagctactgtgacatgcaaaggaaaggacagtgcagaattaaaccgtgttgaagaccagtggaaattgtataatttaacttggatttaggcaggaagtgaaatatgggaggagtaaagaaaactgaagaatttaaagttttcctgaagacagtaataatgcagacacaaactggtttcatatggtgagagcagccacagcagcagcttgacctggtattctacctgagtagatgaagcagaagatcagcaagtttggcagagttttggtttaagaaaaacaaaccactactacctagcacaagttaaatttacaagtctgctcctcaaaaatg

SEQ ID NO: 17307 - DNA, 5828 bp, Homo sapiens
tgtttgtgttttatttctttcaaaatatgccttgtggtatgtatgttgacatgtaagtgcttaaagaaaagaattttaaattgtgggaatacgtctttggagcaaactttaatctcatgttctatgtaaaagacttaaaaagtcatacagttgcacaagtagtttatgcactatttacccacaaggaaaaaattgaaaacattgtgccaaactacaaacaagtgactgtactgtatatatttttacttctatatcaacatttggttgtatttggggaagttgtccctgttaatttactagaaacattccagtgattcttgctattaaccacccccacttatgtggatagcacctgtagatcatggtggaaaaatatgttgtgttacacaatttaccaaaattaaaggatactgtttgaaatgtgccaaattttcttacctcatctcacagattcacccacagtttaaagctcattaattatttttaaatggatatatacacacccaaacatatatatgtatatgtttgtgtgtgtgtgtgtgtgtgtatatatatgtatatatatatatacacacacacacgttcttttaaagttttagactctactgtcctgtgtggaaacatgaacagctaaacaaggcaaaataaagattttcttgttccattgtgtaagggttaaaattttggaaaagtctgaaggccacaacagctaagtccatcagggacccaagtatatgcatttacagaacgttttacaaggaaacaaaacagctgctttcaaagtttgttttctaaaagcaaaatctgtagctgaaaattatttaaagtgcaaagttatattgctgatactttatatctcagttttatatattttataatagtctgggataaattataaaaatagctataaaatcaacactaatgataaatgaagtatatagaatgcttttatttaaatagtttcctaaatgttttattccagttttgtcaaaagtgcactcatatcatggctttagtgttctttcagtgtttaatcttgcaatgccaatgtcatttaaagaaaatgttaaggcatcccagttcaaccaaatttttcttcttatgagtaaagtacatttactatcagataagatgaacaatttgtggcaacaactgatttgggccatatacccttagtctgaggataaccaatatttgatgccacacactaaacttaaatctcaattttaagtacaaatttttaaatcacattttttattcagtactccccctactttttaaaaaaaatttcacagccccaacattcctcactactactttttcttcccttttattcaccacttgacttctaacatttgatctcttttctttgcacaattgaaggcctgtgcatctgatgactgatgcattatggcacagatgagataatggatgtgagagcgctttgtagatcataaagtgctatacagatataggggattaatattattaatattgttagttgttgtcgttgttactattcttattaatattgttactaacctattaacttgtgaatatataggctggggtgggagggtggagaataagtgggaagggaaaaaggggatttaacaaaaaaagggaagatgtttcaaaaggaaaattttaagcaaaatatgaacctacctagtcaatgccacctaaatgtattcacaaacagagaagcaacatttgaaagtagtcagagagaaatggaaggaagcctgtcatgtatataagtatatacacttcccggtccatgattcctttcaccagcctgctctattccttacagctgggtcgtaaaatgaacaagcctgtgttcttgatcatgtgtgttcccagcgtcagtctcttgtgtctgtggggatgagtgggtgaggagcattctgtgaggctggtacaggcccattcctaggctttaatgctctgtttgcagtgagccctggaaaattacttagtggaaaggcaccagatgaaacatgtctcctgccccatagctaccattcaaaagggaaaataaccaaactggaaaaccttcttctatttctctattctgatagctagctgtactaaatgctatggccagtccctagaaactggtctttgttttgtttttgtttttgtttttgatttttctgttttgcagctgaattttggcttggaatcaccaactctgcctgtattgtgatccccaagactccagacctcagagtcacctgctggcttagaggagtggagtgctttctatgtaatgaaaaggtggcaattaatgaaaaaataaagaaaatgttccattaatacaatgtgtttttataaaagtaaatatgggagcagttgtcccagttttttttcggtatcagttcagctttggagaatggggtgtgagtggggtaggacagcctgaaactgttggaaacaatttccttgtgagaacttgctatcataagtcctttggaatggatattctttcagttgctcctatggagcccattaagggccaattctagggcatagttcatccctttctccaaagagaattgttattttaaagtacctttttaattggcctgcagtgtattatatgtttttaatatataaattagtgacgcataaccagtcactttgtactgaaacataaaaagaaacagagtttgagaaatgagcaataggccgaggcagaagatgtttattctcttaattgcatttaatattcctctcagtacattgtgttctgagatgttcatcatttagcattttgttggtcctgtctctgctctcacagttctttttcttcctgtcataaccagctgccttagtagagtataaaaatagtgttttgccctatcactggtatctcaagtcagaaatatatattatccttggtctgaaattcctgattaccgctcccttctaaccttccccctctgagaagctgtttcctattaatgcctccctaacagagtcccatttaatctttactttcctggaaatggtaacctcccttattcttcttacttaatctcagaccttggtcttagaatttttcttttatggtctcatatcccacctgcccaaattgtcagggctcaacaatcttaggctgctttcttctggaagttcagaaggaaaccttcccattcttaattgcctttaattgctttggctattttcaaatctaattttttaattaaattttttttaatttttatagagtaggggtacaaggacagttgtgttacatggatatattgcttagtgttgaaatctgggcttttagtgtacccatcaccgaaatagtgtacattgtacccaataggtggtatttcatccctcaaatataattttaaacacacactcgtgcccacatggacaaattatatcacatgactgaggaaacttagaaattccttttccctgaagatctgttaagaataggtctcatctcctgccctggttaggtgctatattatatggagaagggtattgagactttgggggtcatgtttgggctgtgataactggcttgaaccagtgaccatcctttctgcctcgccaaggtctcttataccagcttcttcacatatgctgcttcctcccagctttcccttctgacttcttgttactctgcaactatgtgtcaaggccttaccttttcctgatgttttcaaacctcctgcattactttgatcatcacttcttcagccatctcactgaagtccttggtgctagctgggcttttgtgacaactttcaccttctctgaactttttccttgctgggaagcatctgcgtgtgtgagggggctacggagggaagtgtgtgtgtgtgtaagagagaggcaaaaggatgcttcaaaagctataaacaactctagcaagcatcctaagtcctatgtgaggttttgcagttctagtgaatttctgttttagtaggtttcaattagcatttactgcctaaaggagaaaaaccatatccaaggaccttttagccatgcttgctattaccaagctggaccagtgtgatgtagatccaacatgtcttcagcttacagatgctctcagaacagttccaagaattgaagagagctaagtttttatgctgaagaggagaatggagcactagctagtcctaactattgctagaaatagaaatgtttattttctcctttattattgagaaattatctaatttaaggagtaaccattttcatttagggatttttttaatgactgcccatcactacagaaatatgttctttttataaaataaaactaatgtgaggttggtttgttttctaatcataaaattcactaagcctatagttacatttagaagatttagtaccaaaatcaaacttttagtaacaaacaggaatcttgtcaacacaatgtaggccagggattttgtaaaggtttctcaaagacccaaataagggagaaaaaaattttagttgggctgtttaacttgggaaacactgtcatcagcttgagggtcctcagccagcatgtgattattttgatgacaggactcaggctaccctttaaggcacattttttactcagcattaaacactagctacagtcgtgaagcagagctcccattgcagctacatacttgagatgtactcttggtttcagaatcgtaactaagaggtaaggcattggagaaggacaatgtaaaagacagaggtttagaacaaagtttatggtgtgaatgaggctttcaaaatcagtatctgggtaaattgatactaaagacactgaagaaacactcatccacataagatggaaaggatgtctgtccatctaacaagctcaggggtttctgagtctcagaatgacatcccatttcaaaaagaagaaaagagatattgaaatcattctgcctgtttgagagatgactggttatttacagcacaaaaaaaggcttagaatgaaaactagaagaggccttttgtttttcactcccagtgaggagagtagaaatcttaagatgctctactgggctacctgtagcactgactggagtttgctgcctacagagttttgaatgtactagtccttagtttccatagaactgaatgcacctctttagtaagttgctgatttatggtgctaaagaaaatgattattcccatttttttcttcttccccaagccccttaagcatttaagaaaatttaaaataaaagcgttagaggccctttttatgaatgtaacctaagtttctgtttgacatatgacactgcaacttaaaaatgttaggaaattatttgcctttttttttcttttagagttaagctttataaataatctgtagaatcaattgaagtttaaagcttaaggatcactcttaagacgtctacaaaatcttgtatatttttaagtgtgccaatttgtaacatattttgtaagtgtatatttttcttagaaaagtgctgtgaagtgtctgtatgtgagagttttcctttttctgcaccactaggtgctaataaaaggatatttacttcaaagtttctggttttagaaaccacaatacaaagaaaaaaaatacacttttgttggaaattttgtaacacaaaacatgttgtgaaagagtgtagtgatcttgtgcaaaaaaaatgaacatttgtgagcttcttgctgttttatagattttcttgtaaattattcttgtaacacttctggttttgttgttcttgttgcgaaggtttcaaatatttgtgactgaatgtacggtgaaactgtcataatgttacctagctgagttttgttattgtttatgaaataaataaaaagaaaagttt

SEQ ID NO: 17308 - DNA, 98 bp, Homo sapiens
gtcacataagacattttctttttttgttgttttggactacatatttgcactgaagcagaattgttttattaaaaaaatcatacattcccattttctat

SEQ ID NO: 17309 - DNA, 720 bp, Homo sapiens
gactcaccatctctgcctcccatgaggcttacagagttcaatgttggaaatcattgtaatcttcaaaataagtcaccgtgttggattgaaagcttcaaaatttgaaagaattccatcaaatacttgctgtgtaaatgtttctggactttatgttatttaatttactgactgaaatccaatttggaatttggtagcagttaattcaagccaattttttttgtttcttcatttcccctcccccaatccatgaaagcctaaatgtaaaatatatcttttcattcatcttatcaggtaaaaggaaattcagaaaatttccttagagtctttaattcccccacaaagattattaatcacatatatagggcctttttggtgttgaagggaatcaaactacatttgctgcttgtgtgcgtgtgcatttgtgaacacgtacagcatatctatacaaaattctgctatagtgtgaaaatcagggctaaaaacctgaagcctttgtttaattatgcttttcctctaaatagcaacttaaatatttgctagactttgaatcatcgctatatcaagtatctaaaatttgggagggtgaatcagtacactgtgaccaaggtcctcaaattggaatttgaacaacaatgtaaaacctgttctgtcacaaatgttcctgaaagcaccacagctactcaagaagatcaaattcaggacataaactttattgaacat

SEQ ID NO: 17310 - DNA, 492 bp, Homo sapiens
agtctagggaatatgtatcacttcagctgagtggcataagttaaagatgccttggtaaaataggcattggggctctaaattagaatccaggtagggcttgtgtgggaagtacaaattgtgcttgctgtctgtgttccaattctagtagtatttccttccttttaatatactcttggattaggttaatgaccaatatttataaatggaatttttcatttgccatcccggtcttgtttcagcataaaagttcagacagctctgtaaaatgtattgataatatttacatctttgaaataatcagtaaaatggtctggtacaggagttaaataacaatgacacacacacaacaaaacaaacacaaaaccactgatctgtgattgctctccctttgtgtctactgccgtatacatatatacaactatatatacacaaatatatatatacacaaaactgtcatttacctgtatttgcaataaaagcataatgaattag

SEQ ID NO: 17311 - DNA, 3473 bp, Homo sapiens
ttttgcactaaaagcttaatggattgttaaaatcatagaaagatcttttatttttttaggaatcaatgacttaacagaactcaactgtataaatagtttggtccccttaaatgccaatcttccatattagttttactttttttttttttaaatagggcataccatttcttcctgacatttgtcagtgatgttgcctagaatcttcttacacacgctgagtacagaagatatttcaaattgttttcagtgaaaacaagtccttccataatagtaacaactccacagatttcctctctaaatttttatgcctgcttttagcaaccataaaattgtcataaaattaataaatttaggaaagaataaagatttatatattcattctttacatataaaaacacacagctgagttcttagagttgattcctcaagttatgaaatacttttgtacttaatccatttcttgattaaagtgattgaaatggttttaatgttcttttgactgaagtctgaaactgggctcctgctttattgtctctgtgactgaaagttagaaactgagggttatctttgacacagaattgtgtgcaatattcttaaatactactgctctaaaagttggagaagtcttgcagttatcttagcattgtataaacagccttaagtatagcctaagaagagaattcctttttcttctttagtccttctgccattttttattttcagttatatgtgctgaaataattactggtaaaatttcagggttgtggattatcttccacacatgaattttctctctcctggcacgaatataaagcacatctcttaactgcatggtgccagtgctaatgcttcatcctgttgctggcagtgggatgtggacttagaaaatcaagttctagcattttagtaggttaacactgaagttgtggttgttaggttcacaccctgttttataaacaacatcaaaatggcagaaccattgctgactttaggttcacatgaggaatgtacttttaacaattcccagtactatcagtattgtgaaataattcctctgaaagataagaatcactggcttctatgcgcttcttttctctcatcatcatgttcttttaccccagtttccttacatttttttaaattgtttcagagtttgttttttttttagtttagattgtgaggcaattattaaatcaaaattaattcatccaatacccctttactagaagttttactagaaaatgtattacattttattttttcttaatccagttctgcaaaaatgacctataaatttattcatgtacaattttggttacttgaattgttaaagaaaacattgtttttgactatgggagtcaactcaacatggcagaaccatttttgagatgatgatacaacaggtagtgaaacagcttaagaattccaaaaaaaaaaaaaaaaaaaaaaaaaagaaaactgggtttgggctttgctttaggtatcactggattagaatgagtttaacattagctaaaactgctttgagttgtttggatgattaagagattgccatttttatcttggaagaactagtggtaaaacatccaagagcactaggattgtgatacagaatttgtgaggtttggtggatccacgcccctctcccccactttcccatgatgaaatatcactaataaatcctgtatatttagatattatgctagccatgtaatcagatttatttaattgggtggggcaggtgtgtatttactttagaaaaaatgaaaaagacaagatttatgagaaatatttgaaggcagtacactctggccaactgttaccagttggtatttctacaagttcagaatattttaaacctgatttactagacctgggaattttcaacatggtctaattatttactcaaagacatagatgtgaaaattttaggcaaccttctaaatctttttcaccatggatgaaactataacttaaagaataatacttagaagggttaattggaaatcagagtttgaaataaaacttggaccactttgtatacactcttctcacttgacattttagctatataatatgtactttgagtataacatcaagctttaacaaatatttaaagacaaaaaaatcacgtcagtaaaatactaaaaggctcatttttatatttgttttagatgttttaaatagttgcaatggattaaaaatgatgatttaaaatgttgcttgtaatacagttttgcctgctaaattctccacattttgtaacctgttttatttctttgggtgtaaagcgtttttgcttagtattgtgatattgtatatgttttgtcccagttgtatagtaatgtttcagtccatcatccagctttggctgctgaaatcatacagctgtgaagacttgcctttgtttctgttagactgcttttcagttctgtattgagtatcttaagtactgtagaaaagatgtcacttcttcctttaaggctgttttgtaatatatataaggactggaattgtgtttttaaagaaaagcattcaagtatgacaatatactatctgtgttttcaccattcaaagtgctgtttagtagttgaaacttaaactatttaatgtcatttaataaagtgaccaaaatgtgttgtgctctttattgtattttcacagctttgaaaatctgtgcacatactgtttcatagaaaatgtatagcttttgttgtcctatataatggtggttcttttgcacatttagttatttaatattgagaggtcacgaagtttggttattgaatctgttatatactaaattctgtaaagggagatctctcatctcaaaaagaatttacataccaggaagtccatgtgtgtttgtgttagttttggatgtctttgtgtaatccagccccatttcctgtttcccaacagctgtaacactcattttaagtcaagcagggctaccaacccacacttgatagaaaagctgcttaccattcagaagcttccttattacctggcctccaaatgagctgaatattttgtagccttcccttagctatgttcattttccctccattatcataaaatcagatcgatatttatgtgccccaaacaaaactttaagagcagttacattctgtcccagtagcccttgtttcctttgagagtagcatgttgtgaggctatagagacttattctaccagtaaaacaggtcaatccttttacatgtttattatactaaaaattatgttcagggtatttactactttatttcaccagactcagtctcaagtgacttggctatctccaaatcagatctacccttagagaataaacatttttctaccgttattttttttcaagtctataatctgagccagtcccaaaggagtgatcaagtttcagaaatgctttcatcttcacaacattttatatatactattatatggggtgaataaagttttaaatccgaaatata

SEQ ID NO: 17312 - DNA, 2855 bp, Homo sapiens
aaaggtcccagagatatatagacactggagtactggaaattgaaaaacgaaaatcgtgtgtgtttgaaaagaagaatgcaacttgtatattttgtattacctctttttttcaagtgatttaaatagttaatcatttaaccaaagaagatgtgtagtgccttaacaagcaatcctctgtcaaaatctgaggtatttgaaaataattatcctcttaaccttctcttcccagtgaactttatggaacatttaatttagtacaattaagtatattataaaaattgtaaaactactactttgttttagttagaacaaagctcaaaactactttagttaacttggtcatctgattttatattgccttatccaaagatggggaaagtaagtcctgaccaggtgttcccacatatgcctgttacagataactacattaggaattcattcttagcttcttcatctttgtgtggatgtgtatactttacgcatctttccttttgagtagagaaattatgtgtgtcatgtggtcttctgaaaatggaacaccattcttcagagcacacgtctagccctcagcaagacagttgtttctcctcctccttgcatatttcctactgaaatacagtgctgtctatgattgtttttgttttgttgtttttttgagacggtctcgctgtgtcacacaggctggagtgcagtggcgtgagctcggctgactgcaaactctgcctcccaggtttaagcgattctcctgtcacagcttcccaagtagctgggatttacaggtgtgcaccgccatgccaggctaatttttgtgtttttagtagagacagggtttcgccaagttgtccaggctggtcttgaactcctgggctcaagtgatccgcccgcctcagtctcccaaagtgcgaggatgacatgtgtgagctaccacaccagcaatgtctatgcttctcgatagctgtgaacatgaaaagacatctattgggagtccgaggcaggtggattgcttgaggccaggagttagagaccagcctggccaacaaggcaaaaccccgtctctactaaaaatatgaaaattagctgggcttggtggctcatgcctataatcctagctacttgggaggctgaggcacgagacttgcttaatacctgggaggcggagattgcagtgagccgagatcacgctactgcgctccagcctgagtgatagagtgagactctgtctcaaaaaaaagtatctctaaatacaggattataatttctgcttgagtatggtgttaactaccttgtatttagaaagatttcagattcattccatctccttagttttcttttaaggtgacccatctgtgataaaaatatagcttagtgctaaaatcagtgtaacttatacatggcctaaaatgtttctacaaattagagtttgtcacttattccatttgtacctaagagaaaaataggctcagttagaaaaggactccctggccaggcgcagtgacttacgcctgtaatctcagcactttgggaggccaaggcaggcagatcacgaggtcaggagttcgagaccatcctggccaacatggtgaaaccccgtctctactaaaaatataaaaattagctgggtgtggtggcaggagcctgtaatcccagctacacaggaggctgaggcacgagaatcacttgaactcaggagatggaggtttcagtgagccaagatcacaccactgcactccagcctggcaacagagcgagactccatctcaaaaaaaaaaaaaaaagtaagaaagaaaaggactcccttagaatgggaaagaaaaatcataaaatattgagctgatgcctgtatatagaaattaagcgtttctcgaaagctgttctatgttttgctgttattttagtctttattctcttcctttaggtggagaaacaaagtaccaatttgaagggattttttttattttgtcttttggtttctgtcagtagaaataaccatatgtgctaaccaaatttctgtgaagaatgttttcatggttatcattatatctaactataacctcccccatagttatgaagagtaacctgaaatgccactattgtggaaataggataattgtaattgtgaaaaaataattttaaggaaatcttacaagtattacattaaaaagatactatgactgccacctgccatttaccttctaataaccctgccatgtggtttgcagaaagagatggatatagtagcctcagaagaaatattttatgtgggttttttgtttttcgttactagatttcatggatgaggggatatggttgaccttttactttttaatggagcagccagtttttgttaattactcacttgtaaattgtgagattctgaattccttacctgctattcttgtacttgtctcaggccaaatctatgctgtggttcttatgagacttgtatgaagatgccctgatttgtacagattgaccacgggaatactactgccatgtaatctgtatagttccagataatttgtcatgaacattgacagaatgacaattttttgtatttgctttttctccctttaagagcacattcttctgtaaggagaaaggcagcattctggctaaaatgtgtagaaggtaatttactacacttataaaatagtgtgacttttgtgaaaattttgaattagctttcatatgaagtgccttaagtagactcttcatttacttttctggtaatggtttaaatatcatttgttatgcatttttaagatacagttcagaatgacacattgtagtggcaaagataaccaaatgtctggctgtttgctttttgaccatatcaataaacttttacaatctaa

SEQ ID NO: 17313 - DNA, 913 bp, Homo sapiens
aggccagcggggaggatactgtccccaggagcaccctccctgctggtcttgtccctctgcccctcccacctgcacatgtcacactgaccacatctgtagacatcttgagttgtagctgcagatggggaccagtggctcccattttcattttagccattttgtcgcctgcacccactcccttcatacaatctagtcagaatagcagttctagagcacaggttctcagtctaagctgtggaaaagctccccttatccaacagagtttaaaagtagtgacttgggtttttgtgagtgctttgtttactaaggactttggggaggaacatgctaagccacgaccaatgaggagaagcaacagagcctgtctgtccccatgagcagagtctgtcctctgctcttctgcagtcaggccactgcctgggggctctagtcattccagtggaagatgaatgtaatctgcatggtgatgtgacaactgtttcctccttgaccccagaggatctggctctaggttgggatcaatcctgaatttcgttatgtgttatatttacttttattaaaaaagtatagtatatattaataatacaaaacaataacccttctggggtttcttgtggcggttgaaatagtcccacatgtggtcatcagaaaataagccattcctcataccaatataggatcagctccttgacctctgaggggcaggagtgcttcctggtgtgtgtattagaatcccttcctgccttgtttcatggcagtgaaatgcctcttggtcctgtccaagtgtgtctttcactgatttctgaatcatgttctagttgcttgaccctgccacatgggcccagtgttcatctgagcataactgtactaaatccttttaccagatcagtataataaaggagtgatgtgcaat

SEQ ID NO: 17314 - DNA, 1861 bp, Homo sapiens
ggaatatagtctagtctagatgcatttcaaaaggaaagttggttttgagcccagtatactgaactagaatattctagatcttgttttaccttaaaagactgaaatgtagctgcagtatttttcgtcagttaaaactgttagatctctttagtaaacatacaaatgtgtttttcagtaggcttcaattacaaacagttaagtacttgtttcttaatagtttcattaatgttgagtcctaatatggcaattctgtttttgagacacttttctgccttctatcactgatagtagcatttaagtttcagattctacagcctagtcagcagatttatctttgacagcataatttctgatctacatttaaatactactttattttataaggtaatatagttacttactgtcactagctaatttttttttttttaccaaatctctcaatataggaaacattttttggaaaggatggatttagaggagagattctaaatccattttggatgtatttgtttctttgacttccttaacttccaaactcaactccctttctagatcccattcattttctgcacctcccccataggcttgtttctctccattgctattaaatgtagaaggccatacctggaattttaaaaatattattcctggtaatacagctcagtgtcattttcctatttttaaaacatgctctacatgcctaatgttttgtgattcactttaacctgatggtttgcatttgctgtttttcactcttatgtcagagcagttgggttttaccccttagtttttatgcctgttaagctttactgtgcttttgacaggtagttttgggtcagttatattcagttttagtattgtattccaagttgataactcttccatgtttcacatttctaaatttaacagagatgctgtagcttaaaacatgttttgataagtaattacactggacctaggcaaaaccactgaagaacaagtgttcctttttaccacatacatattatgttttgatcactgctgcttgagccccgctattggtataattcagatcattttagcttgttgctgaggatgtcacatataagacaggatcaaacctgaaagacactaatggttcatcctctataaggccaacaaagaaaacaaattaatgtgatgtaacttgcatttatgtgcactctgcataggtttcccaataatactgtaatgttgctgaacacctttccctgttttccatttatacacatattaaagtcatattgggaaagatggcaaagcttttgagaatataaacacacctgttttgtttttcttaagttcaacatacttttgtagaatttgtaaaataaatgttcgtatcataattgagaatttatagccaaggatcctcaaaacagaagtttcatcttaggatagtgtttgatatatctaagaaagtccagtaacagagaagaaatgtctcaaatgtctcgtatcagttttagtgtttttcagtattagggaaaggtaatataaaaacaggtaaaatgtataaaaatagacctgatcaacatcataggagataaatattcattatatagcataggatattattacttgaatgttctcagggaggcagcaagtcagaaggcctaggttctagtcctagctccatcatttaccaactgtgtgaccttacttcacctcttagccttgttctcctcactagcagtaggaaagtaacacctaccctgcctacctcacagggctgttgtgagggttcaattggtatatgtgaaaattctttcagaattgtaaaatgctatatgactgtaaggaattattgcatttgttccaaggttaataaaaatttgagctt

SEQ ID NO: 17315 - DNA, 99 bp, Homo sapiens
tttaaacccatttccagtccaaaccaatgaaaatagtttcccaaataagtattttgtcaaatcatttacaaaaaaaataaaaattttacttaatatttt

SEQ ID NO: 17316 - DNA, 924 bp, Homo sapiens
gggggaccccacgtgggccaatctacaaatatgcgtccccctctcttccaatatccatgtctcatacactatggcttactgttgaaatccaactgggaagaagataattctttgagcaagcaatggtagattcaggctcctacagaaacagcattgatcatactgtggttcttcgagagaagctgcccatccgcagtaatatcttccctctgatgctggaaactgtcgacggccatccacttattaatggacccataactaaggaaacatcacctgtccaagttcaaattggaaaccatgttgaagagctccagtttgacattattcatgcaccacgataccctctgattattggaatccattggcttgagacacatgacccaaacatagaatggagtacccgcactgtgtcctttctatcacgttattgtcactacaattgcttcaggcacaggtggaatagaagaaatcgtgatgaaataatttctgggtagatcctgtgtcctagtgactgttcctggcaacctgtcttctgttacctcagctgtcatcagcatttgctgctccctgaatcttctactgaacatcttgctatgtactaaggctacctgtacaacgactctgcctcttagatgatagactgaacctgatgactttgagctgcttttttttttttcactaactctgcatgcctctatctcagaactctgcatcctgcggaactgttttaattacaattatactaacaatacacatgagaatagatattagaaactaataatgaaaaagcatagctgttaaactgacttgatttttttcttatcaatattttctatatcacaaaaatggcaacatcttttacataaagaaaataagtttgtaagtgatatttcttaaaagaatcaataaatattagcaatttct

SEQ ID NO: 17317 - DNA, 703 bp, Homo sapiens
gaggcaacagatagagtgtccttggtaataagaagtcagagatttacaatatgactttaacattaaggtttatgggatactcaagatatttactcatgcatttactctattgcttatgctttaaaaaaaggaaaaaaaaaaactactaaccactgcaagctcttgtcaaattttagtttaattggcattgcttgttttttgaaactgaaattacatgagtttcattttttctttgaatttatagggtttagatttctgaaagcagcatgaatatatcacctaacatcctgacaataaattccatccgttgttttttttgtttgtttgttttttcttttcctttaagtaagctctttattcatcttatggtggagcaattttaaaatttgaaatattttaaattgtttttgaactttttgtgtaaaatatatcagatctcaacattgttggtttcttttgtttttcattttgtacaactttcttgaatttagaaattacatctttgcagttctgttaggtgctctgtaattaacctgacttatatgtgaacaattttcatgagacagtcatttttaactaatgcagtgattctttctcactactatctgtattgtggaatgcacaaaattgtgtaggtgctgaatgctgtaaggagtttaggttgtatgaattctacaaccctataataaattttactctatac

SEQ ID NO: 17318 - DNA, 425 bp, Homo sapiens
cagttaataaatttagaataacttaaaaaattcaatggccttctactgcagggaatttaccaggaaatctacaaagcaagttgtgtggggacttctgcttcctttcacattggtgcttttccatttatgccagtatacatttgtttcaagacttttgatctccacacttcatttgttcaaataagccttactcattaggccttaaattaaaagaaattctgcccacacacacacaaacacatacacacacatacacacacacagacacacacacacgaaacacaacacagacactacagatttactacattaaaggagcattcagcttcttaagagtagcatgacatttttatctcaatagaatagccctcttttgcttttgtatcacagaagtatagcaccttcttacagagttttatatagtt

SEQ ID NO: 17319 - DNA, 948 bp, Homo sapiens
aactgccctatgtagtttcataatttggtaacatgtaccttcatgttgtaaagttaatagagataaatatttttatcaaaaattttataaacacagcctttctttagcattgatttaatttcagaacatcttcatattgattattagccataaagtttctaacatgaaacatttatctataaattttgtgattatagtagtggaatacatagaaaaaaatatgctttcaactttgtgagtgaatttcgtgttgtgtaagttatatgtcaaatctttgaattttaattttactcttttatacatgtgataatttcataaagtgagggatcccaaaaaaagagtttcatccaacattcttgttctgcaggttgcttttataaagaaggtgaactattttcatgtaatgttaagagttaaacttatctttcccaaatataactttattattagcttgggaaaaatgaaattgtattcccatttttaaaataaatacaaatgtttatttcagaagggcagttttgattatatgtgaatacacaaattttactggatttatcttaataaaaagactctgacgatgattgtgttttgttatatcttcaaaaatatagctagtgaaatattgtgcttaatttttttctattgtgttattcatgaaaatatttaatattcactgacataaaattaatataaagtaaaattcaccattttaattataataaaaataaagtatataattcaatggttgtcagtatattcacaatgttgtgtccactgtttaattccagagaatttttatcacccaaataagaaacaaagcaccaattagcagtctcttcccattttcgcccaacttatcccccacctccatcccttggcaaccactaatctgccttctatctctatggatttgcctattctgaacatttattataaatggaatcacat

SEQ ID NO: 17320 - DNA, 301 bp, Homo sapiens
gatttgtggtgttcctaggccaaactggatgaagatgaaattaaatgtgtggcttttttcctattcttatcaaaggcatcgttgtctgctaaattacttgaatattaagtaatattaaatccccatttttaggggaagtgagatttaaaaaaccattcacaggtccacaatattcatactatgtgtttgcagtagtgttcaagtgtttatttaagcatataattggtgtccaccaggtcctcacaacttctctgcacacaagcttctaaaattcctttcaaataaagttactttaatattt

SEQ ID NO: 17321 - DNA, 688 bp, Homo sapiens
tttcagttggagggaatatatgatacagtcttttggcttcgtaacaggtgtgcatttcaagataactgcattctgttgccctggtattctttagttgggaaaacacattgttgaaacggacgtattctgtgaagaatgtacaagatataatggctacagtgcaacaaaaatgtaggtgaaatttaaaagcattgtttgagagagtatttttttaactgatggaactctggaaaaaaattatatttaagtttcagcagtttaaccctgaaattcattatgtctaatttctaaccagagacaaaataactaaagacatttcagcattgcttatcaagttgctacagcttgattagtcttgtttttgtagccattacatcttctttcttcttctctccttttcctatcatccacttacactttttctcaggaaagtggactgaacatttaaaacaaaactttaaaaaattatttaactcattatttaatgagttctctgatttagtttttaacccctatgaaaatttgacttaaactaatgactgaaaattaaatgattacaggtatgtaattgtaaattgctggtgttcttctattatctaacccaaatatttgtgtgggggtggggaagcacaatggaaaggtaatttaaccaacataacgtcaaataaattacgaagtgtacagaaac

SEQ ID NO: 17322 - DNA, 245 bp, Homo sapiens
ctgcatgcactttcttgtcgtcatttggaaccaggcttctatcaactactatactagtcgaggggctttagacctttcctctgaggagggctggcatctcttcaggtttaacagagaagaactcctggacatggcatgggaagaatgaaagaggctttgtaacaactcatcccaacacagcctccaacatttgactgtcacctgagtctaacagcagtttgactttgttgtacaatacagcaagt

SEQ ID NO: 17323 - DNA, 2024 bp, Homo sapiens
atggatccactttaaagtattacaactcaaagccgttttttttttgtgtgtgtgtctctgcattagtactttgttatttttccatcactaaaggccaatcagaatttggaaccatgctgctacccaagaaatctaatggaatgaattagttctgtagatgacaatttcttcacccatttatgagacctaaatcttttccataacactcatgtattcagtataacaacatactaactgaaagagggacctgattgtttaaagtttgattgcagacactgtagaacataactcattatgtttcagataaggtaactcctagatatcaaactaatttgttggggtagagattttacaagtcatgccattagaagattttctctgatattatatgtgcagttcagttacaagatgaaatcatgtttttttaacaaaagagataaaatacaattgaagcaaaaaataacagctagtatataatatatacagtctgtatttgcttttcacagtaggcctgatgactaaaagatatgctttattacacgctattttcacctcttgaaagtcaaaggtgatgattaatttcatttagcagggaagtggaataatatcttttgaaataactaagtccactaaattatacagtatgctattctggttctaagtacatattagtcccttggcaaatctgttctttcaaagcataccttccccaaatgagcctacctacttcttaaaaaacatataacacaatgtggtagtagtaggtgtaaggaaggtaagttttttcatagtggtatgcaaacatatcattgaaatattacatagatataaagacttagggaataaaaatagcagcaacaaatacttgatagatttatcctacttgggagaaatattttgtagcagagtatttagtatacttagaagttgatttagcaattaggctttaatgaccttacaaagtgaacataactgaacacaagtattttttcaatgcaagatgaggatgaaaattttacatttcaacccatctggctaaagttaagacttagcaaaaattaaaatgttgcctttgtccaagtatagattaaggcaacaaacatatttgggtgtgtaatttgaagttttggactgaaatatctttgcaagtatccacataaaattctgtaatgccttataattatattctaataattatgcattatactaagacaccattaagaacagttgaggcactacactaaatcaaaccataaatgaggaaaaaacttttaatgttcttttctagaagtgttcaaataggtcttgatatgaagctaaaagccttatttatattatcttaatatttcggctaaaatgttaagctccataacatgaattgatacaattccaattttatcaatattttgtgatagaaaaatgttaatattattcatgagctatacagtccttacattttttcccttggtgtaggaacaacggaggagtttctcctctgctaactattcatatatgtaactgtaacaaaagtgtactatgttatgcacacattacaaataatataaggggaagttttattagcttagtaggaaattgttattattaaggtttaaaaatgagaacaggtgtgagttttccaaaatacttaaaaataatagtgtcaaaaattcaggggcagttaaggagtcatggatggaactagaggtcactatattaagtgacataagccagaaacagacaaacattgcatgttctcaattatttgcgggatctaaaagtcaaaacaattgaactcatggatatagagagtagaaggatggttactagtggctgggaaaaggggtgtgcgaggggaactggggatgcttaatgtgtacaaaaactatgtagttagaaagtataaataagacctagtatttgatagcacaaccgggtgagtatagtcaataatagcttaattgtacaaataactaagagtataattggattgtttgtaacacaaataaatacttgagtggatggat

SEQ ID NO: 17324 - DNA, 3449 bp, Homo sapiens
tggatatacaccaaactggatacccaactttggaaattctgactggtctcagagtctacttgatagaaggactgtttgagaaatgttagaaagcagcagcaattataaggcaaaataggtaatagaaatccaaaaggggattttccttatagaggacattccaagaacacacaacacttataaagcacattgacttgctcattttaaataccaaacttgtgtgactagcagatgaaaattataaatcaattgattctcaggaatgtaactgtggatatgaaagtgatcctatgcattgttaataattccatggtcttaggacaattttgcttaccactttggatctttgtttgaaagccacattttcagaaccagctcatgtattttctttggttatttgaattttattttctttatggacaagagcatcataacataatgataaaaacatatagaaaaactaaagtatcatgatctagatagaagcctgtatttggaatacaggtttgttttgctttctatgttgagaagcattgaaaatgctaatataaaggtgtttagacatttttacgaataagtcagtagtgttttttagtatcagtagtgatatttgtttgtaaattatttacatattgggaaaggtcaataatgaagaaatgaaagaatggaaggaaaggtgtggataggctcattggtatttgaatattctgtctgtcaagtaactagagtattaggctaattgtctacagacctaatttaatcctggctgtcctactgatgatatttggtaaattgtttaacttctgagcctacgtttctccatatataaagtggaaatagtattactatgcctactatatgagaatggttatgaagacaatgcaatgccatgtttagaatcggtttgccagaagaaaattgttttagaattttcccattgacttgatgaatctcaaaagtctcacgcaggaaataattgcttgctgtcagtcaacttccaaacaaaatagatcacagtgtttttattgcattaagctttttaaatgaaaatttcttttttaaagtagtattttatagtcttacagaccagtaaaaatagtaacaagtagaattgtggttttgaaatattactaaggaaaacactctataaattgttttattccttttctggtaggtaaacctgcaaccaccaaggactccaaattgtgtatgacagttggtaagccctaatatacactacataaaaacgttagggctgcctgtaatcccagcactttgggaagctgaggtgggtagatcacttgaggtcaggagttcgagaccagcctggccaacatggcgaaaccctgtctctactaaaaatacaaaattttagctgggtgttatggtgggcacctgtaatcccagctactttgaagatgaggtagcagactcacttgaaccagggaggcggaggttgcagtgagccaagattttgccactgcactccagcctgggtgacagagcaagactctgtctcacaaaaaaaaaaaaagggggctgtacataggcagcaaactaagctgcagtgatgttgcctatatttaaattttctcaaatggccaagctctgatggtctactttatttgagcaatagttgagacttataattgcctataaataaacaaacaaatgaactatttgtttttttttctcacaacatctggcctatattgtctgtcaggaagccatggctccaatgtaaagtacatagttcttacatacttcaactgcagctggtccctgacctcaccaggtttcagagatgttcttaaaggaagccagctgtggcaggtcacagattcatgggaaatggaaagaaccaaggaatatagctcttgcctcacctttctacccactgcagatatagttcaagccagagtaatggaagaacttaacttactagcctctcaggctgctcctatccctacctcccagtgtacagcccctccccatctctttagtcccctttccctcacttccccttttataatgtcacacaaatcagggacagtaggatcacattataacctactttgtcatagggattcgatttttcttatatcaaatcatgtttcctgaaacccagctggggcatatgcactcaatgtctaatacatacttattaatgtaccggatattggccttgcccctggatatcagcaatatattataaaaggttccagtagatgagacgattgagtctgaatacaattgcagtaaattgtgccaataaagatattgtactgttacggtcttagagttaaagccgcttgaatgcagcatgcacattcatgtaaacagacaatcagggtaggcctagaataaccacaaaaattctattggccttactgcagccacctatatgtagaacaatggaggagatagtttgtggtccattattgtaccctgtttcatccattagcatcagaatctctctttcaggtcatttattaaatatgattgaaatgtttaaaagttcctgaacatgattcatgatgattaaaatatcatacaactgataaaagactttaagaactttatatatttcctgttgcctcaaaatgtaacagaaattattcttagagctttgattttagctatcctaattactgcaaataaatatttgttcttatagttttaaatcaaaaagaaaagtcttgttataaaaccttaagcttgaaatcatattaataaaatatattgtacatagtggaaaattttcagtagctaatttaaaatttcagaaaatgctattaaagaattttgattcaagtatttaaactgtttagttatgcatgcttcttattaaccgaaaatgataataccatttagtttagtgatcagtatgagaagcaatacctaatcctatgttgctattgtattttttcctagttggtgtgcctgctcagaaaaacatatactgtatgtgtatacatacctgtgtatatataaaaggtcaatttatatatttttctataggaaaatggagtaacaagttccctatctcccatatttatttgtccatagtaaaatggccacattgatgataatttctagaactagtttctgagattgtcagccctttgtctaaaataatggcagtattaatgattgacttctgtcactgccatagttacctggattgtcagccttggtagcctttgtctaaagtcctaaagagttccaaaaaaaatgtgttgaaatttaattgctaaatagtggttggtgattctttacagtaggaattgtaataattttcttgcaaataagttatttactgctattgatattgaataatttgtcttttattcagatatatttcaaaaagcatgaatatatgattattcataaattgtatactttaccagtaagttttcagaggaaataaagacttttaaatccttttc

SEQ ID NO: 17325 - DNA, 849 bp, Homo sapiens
gtcaatctgaaagatttttcaagaatcttaaaatctcaagaagtgaagcagattcatacagccttgaaaaaagtaaaaccctgacctgtaacctgaacactattattccttatagtcaagtttttgtggtttcttggtagtctatattttaaaaatagtcctaaaaagtgtctaagtgccagtttattctatctaggctgttgtagtataatattcttcaaaatatgtaagctgttgtcaattatctaaagcatgttagtttggtgctacacagtgttgatttttgtgatgtcctttggtcatgtttctgttagactgtagctgtgaaactgtcagaattgttaactgaaacaaatatttgcttgaaaaaaaaagttcatgaagtaccaatgcaagtgttttatttttttcttttttccagcccataagactaagggtttaaatctgcttgcactagctgtgccttcattagtttgctatagaaatccagtacttatagtaaataaaacagtgtattttgaagtttgactgcttgaaaaagattagcatacatctaatgtgaaaagaccacatttgattcaactgagaccttgtgtatgtgacatatagtggcctataaatttaatcataatgatgttattgtttaccactgaggtgttaatataacatagtatttttgaaaaagtttcttcatcttatattgtgtaattgtaaactaaagataccgtgttttctttgtattgtgttctaccttccctttcactgaaaatgatcacttcatttgatactgtttttcatgttcttgtattgcaacctaaaataaataaatattaaagtgtgttatactat

SEQ ID NO: 17326 - DNA, 4633 bp, Homo sapiens
accagtctccaggaagaagagaaagaaaccacactggctagtgaagaagcaggagcttcttgttttaattgctcaccaatggttggttcttgagtggctatatttcagagcttttcctaaatgtattgtttataggtgattatcattctgtgacagtcccttgtttcaacaggcagcaggggtgttcagttggagcaaattagctttggcttgagttgttcatggggccttgatgttggggaaacagagacaaattcagttgtgaaaagtattatgtattaagtgtttgaatttatatatttttctatgtcaaaattataatataaattaccattgtttgtggaggattacatttaaaaaagcaaaaagtgaaaaaaaaaagctctggacacctttaataagctcgccactgttttttgtagtgtagacaagttaatggtcatttattgtgtactattcattgattcagtgatgtgaaattgagcccccaaaaggttgtttctgaagctcgagtacttcccaatgccgctactttgctgtggacacccctgctttaaaaacccttttgctagctgtgctattgttgtatttgatattgcaaattgctatgtgtgtggtgatggcaaaaggcttttaaaagttggtgttttctttttcttaaaaaaataataaaactacagacaaaaacaaagtgcaaacaactgagacagcaaatgaatgagcaacaccatgcatatagattgagtacttggagaatactcacgttttttaactcatgtagtgattgctcaccactttgcaaagtatttttcctgcctttcagtggtctgcccaggtccatgatagatcattgcagaaagtcatttttggataggctgctatctaatttgcagttgtcagaaatactgtgctgaaagttttatgacatccatcttttaaattttcaggccctgaacaggaaagttgctcctgaagttatgtttccaggcttagaaattccctctctccaatcatctaaaattgaagatgactgaatctattttaagatctaaattagcatctcttcagacacacacttcctgattcagtgtttcccaatcatgattagaattagactgcaaagcacgtcatgggctgggattgagaactccatgttgctctgtatcttaggcttatatacgtagggatagagtaagcagtacaaagtgtatattttggaaaagacaggtaacaggtaacagcatcgctaatccaattactgtgccttctaaacggagacactcagacacttgaactcatctttttatgactaatagttttttgattaaaaatgtgaacaagaaaatactaaaataaaaatcctttcgatttagccaactctttttgctgtaggctaggaatacaccctttttaaattaacacactgtagatcctttttttctgttttaacattcctctaactcccccatttatcttttgtctattaatattcactagccaacatagtatttttgcagcctaagagttcattatttaaaaataaactaaagaaatatgtcacctttgttctgccttggtcttaagagagttgtttctagagaaacaagttttatggttctgttttcatttgtttcattttttgaaattcaggaatacacagagagaaggcctagaggttagagcactagaatgcaaaagaggatttattttcttaagtttaggtagataagtcagctcttttgaatgttttacttatttttgcctgagttcctagctttacgcattactaggaatattttcttttacaggagggagaagggttttgagggagggggtgggtaaggcagtagggatggggttaggtaggggagaacatttctgaaaaagaacttataatgaagctacaaatccatccttatttcttattcagtgctgaatactacctcatgcaaaatattggtgtggctgcaaatttccctctgaagctgacacaattaaggatgaattaccataacatcttcatttttcctcatttcattgcctctcatacagttttctccctctgatttatttcattttggtagtggattttgaattaagtatttatttctctttgcaagtgactatttgattaacacattaaaaattttttaaaaatttcccctttaagttatgatggctgcctatagaatttagactgtttctcaccctgatccatcctgatattatgttattagctacgatttcaaggtcactttgaagtcagacttcacagttttctacaggtgtatttcttgctatgctcagtgggaaccagggagcagaaaagattgtggaaagtgggaacattaattgtcacgtggctgttgagccagagaggccactggctgccatgcctcttaccagccaagttttaaatggttagagtggcattggcattgattttgcttttctcttgggttttcttcatttcttttcataattcatcttcaagctatagatccatccttcttccctatccaaatactttgttctcagtgggcagtcagatttttttggcttccaaacctcactgagcatgttcagagaattcctctcattaaggaaatatttttccccacaattgtctgatgtatgagtcctctcagaagcacaagtgcatactaggaaggctttgtaaactggttttgtaggcaggctgtacctgcaaataggcattctgagcaaggatcctaaatttccctttggctcatgtcccccccgccccaccccaccttctcctttttggcatgtctggtgaaaagctacaaggttcacagggccaaatattctcccttttgttctctaaacatgttgcacacataaactcaagggagtgatttcggttcctaagtcctagggagttctattccatttattctgatgtcccttttaaggaggagttggtgttgaagtgtgacatgctttaatgataactgctttggcaattccccagacaggtatacttcttcatccaaaattgcacctaaggtgttcatttagacaaaattgttcgcttagtgatccactgatctctaatcagaaatatttttaaaaaatacaatttagatctctgaaaattggaaccactcaagagtatcatcttgatagtgttacttcagcatatgactgactgattttatgaagggagtttagctgacttttccctgtagccctatcatattaaaaacaaaaagtggtccacttgaagcagcaaggacaaagggcagtttagggagaggcagggtgaaggggatagctcgattgggcatccagagtggaaaaggattattattgtacataatagcagttctggctggaattccaatccactttctggggatcattttgatgttgaatgttcccccaaagcattctgacaagtttggtccacttggctctttaccccgggtaataagacccttattgactttgaaaaactggcataaatgagcttaagaaatccattgtatacagtcctagtgtttgccttcttggtaaaattacatttaaggatgtcatttcatgagtcaaattgtatctgctgacactgaagtgtattgagatgttgttctttagtttaagtatgtaacaaagtaatattcaaaggggatgtttgggggtggggctgggaccgggtggctttatattgataatgaaatattccagagcaaaacacattgtcctaatgaagttgttgcagctctcttcgttttcttgtgccgctggaattggcttgtgggtcacttgttgtgcaaaagtgaattaatttcaaataggaatcatattgcttttgtgaaacaaagaaaatttaccaccttgtctgatacatagattggaaggcgctcttggtaaagaataacccacaaacacctgatcttgattggaaagcattgtaggtcattagggaaaactgatgatgctgactgttgctccagctgtgttggcaattcaagatgaccttgttactaactgaaagttgctgtcaaccttagcaaacaaaccagctaacaccattacagcactggttaagtagatttttactggcactggctggcgttcagctgaggaaggctaggatacagactttaatgaccaagagccagactagctcgagctagaaatcagcaacaaatacctccttgtgctatttgaatgctaaggtattagttgcaataggcttacgccttcgctcctctagtgaggggaatgagcctgatgacactattactgtttacctgtcaaaccagggtggaaatttagagggatgcaagtacagtatgtctcattaagcagtctctgttgctgattatatgaagataaaattgttgtatatgctgatctgtatgttatgtacattttcacagtgattgaatcattgtaaaaagaaaaaagacaaaaaagaatcaccactgtctattttatgaagatgataaagcagctttattaaattattacagttatgtttcaaatggtgttatctgccacattgtttccttttatctggtggttctctgtttccccctttaaatgtgttttctctgcttcaaaaatttaatgcattttagtattaaaggctattatggaaaaagta

SEQ ID NO: 17327 - DNA, 1189 bp, Homo sapiens
gacatttagggtcccccctgtgaattagaaagttgcttggctggagaactgacaacactacttactgatagaccaaaaaactacaccagtaggttgattcaatcaagatgtatgtagacctaaaactacaccaataggctgattcaatcaagatccgtgctcgcagtgggctgattcaatcaagatgtatgtttgctatgttctaagtccaccttctatcccattcatgttagatcgttgaaaccctgtatccctctgaaacactggaagagctagtaaattgtaaatgaagtaatactgtgttcctcttgactgttatttttcttagtagggggcctttggaaggcactgtgaatttgctattttgatgtagtgttacaagatggaaaattgattcctctgactttgctattgatgtagtgtgatagaaaattcacccctctgaactggctccttcccagtcaaggttatctggtttgattgtataatttgcaccaagaagttaaaatgttttatgactctctgttctgctgacaggcagagagtcacattgtgtaatttaatttcagtcagtcaatagatggcatccctcatcagggttgccagatggtgataacagtgtaaggccttgggtctaaggcatccacgactggaagggactactgatgttctgtgatacatcaggtttcagcacacaacttacatttctttgcctccaaattgaggcatttattatgatgttcatactttccctcttgtttgaaagtttctaattattaaatggtgtcggaattgttgtattttccttaggaattcagtggaacttatcttcattaaatttagctggtaccaggttgatatgacttgtcaatattatggtcaactttaagtcttagttttcgtttgtgcctttgattaataagtataactcttatacaataaatactgctttcctctaaaaagatcgtgtttaaattaacttgtagaaaatctgctggaatggttgttgttttccactgagaaagctaagccctacatttctattcagagtactgtttttagatgtgaaatataagcctgcggccttaactctgtattaaaaaaaatgtttttgtttaaaaaaaactgttcccataggtgcagcaaaccaccatggcacatgtatacctatgtaacaaacctgcacatt

SEQ ID NO: 17328 - DNA, 1534 bp, Homo sapiens
gtccctgtcctcttctgcaggtccagccctggcgagggcaggtcagaggaagtgaagaaatcaagagcaaagatttataatttaatgtgtatgtgtgtatgtgtgtatgtgtgtgtgtgtgtgtgtgtgtgtatgtgtacaaacatgtattttctgcaaatctcattatgctggctagagtgatgcagacttgttcttctttttaaagcagtctcaagaataagcatttctttaaaatgtttctgtgtataatctagtttattttcagagtccattttttcttatgtctttataaggttcacttaacttaaaaacagcttttaaaacaactttttatcttctgtcttgctatcattgttcctacttccctaggaagccctggctacctttcgcattaggaccagtctgggttttaaggctctgggaagcagggttggttagtaaagacaggaatgttggggagaggtgagtagttccttcctctttctcctctccaatttatgcttttaacttattttctacctggataaacttctggaacttggcttttaaatttaacttttctagtttttaagcagtttccaccttgctttggtctaatgcttttctttgaaatgctaacagaattcccaagctttttccagttctagatatctttactagacctttgggggactcttataatggagctgcttttgaaaagcactttaattagataatgtattttgactaaatcacgaggatgcccagtgagagcttctagctgatctcagaggaccagagtgactgagggtaaagtgtctcacagcccatgctgaattttctgcattttaaactgatactgcagtcattggagagagagctcctcatttctcgaatgaaagatgagatatattcatcctcatgtaccacatctgtcttagtgtttgcgtctggggtgtgttatcaaacagagcatggtctacatcccactgtgtcaaccagaagagccaagtgttatctcaattggcccagtgtttctccaggctggggactgttaagggctctaagggaatgtagacagagtctccctgttattctgacttcctgcttgatgagctttcagttcctgtttttgctattgtttcctaaatttgacctacatattacatgggtgtagtgtgttgaggcttttcaaagaagggtctagtgagctaagtttcatcttctggtactcattgatcaaactgacctttctattctcataagcgtttctacccaaagttgtgtgtggaaggagtgtatagcagagaggaaatccctttcaacagagtcagctgctaactgatttcctataagcacactggattaagggcagccacagtggtttctactgtatgtatgaaccgaatggaggaatgttttcaaagattgatttggtgtggattgcaattgtaatggaaggcataacttgggatcccgggctgtaacttgctcttttgtttcccacccccctgacatgtatgtgtgctttaataaagctttctcacttgtc

SEQ ID NO: 17329 - DNA, 628 bp, Homo sapiens
gttataggaataaggacggtaatctgcattttgtctctttgtatcttcagtaatttacttggtctcgtcaggtttgagcagtcactttaggataagaatgtgcctctcaagccttgactccctggtattctttttttgattgcattcaacttcgttacttgagcttcagcaacttaagaacttctgaagttcttaaagttctgaagttcttaaagcccatggatcctttctcagaaaaataactgtaaatctttctggacagccatgactgtagcaaggcttgatagcagaggtttggtggttcagagttatacaactaatcccaggtgattttatcaattccagtgttaccatctcctgagttttggtttgtaatcttttgtccctcccacccccacagaagatttctaagtagggtgactttttaaataaaaatttattgaataattaatgataaaacataataataaacataaataataaacaaaattaccgagaaccccatccccatataacaccaacagtgtacatgtttactgtcacttttgatatggtcttatccagtgtgaacagcaatttattcttatttttgctcatcaaaaaataaaggattttcttcttcacttga

SEQ ID NO: 17330 - DNA, 891 bp, Homo sapiens
ttctattttctgggtattttaggaagagttgggagttgccaagagtaaccatgaaattgaacgaaaggatgaggttcatgggtgagatacccatcagtacattttcttgacttttctgttaagcctatcagaagaaagagcaactcccaaataggttttattttcttaagagttaccactatgtttggaaacagggggtatcgactatatagttgaaagggtcagaaataccattcacacccttcttacccaagtcaattggaataacttgtcttcaaacactttaggctctctaaagtgaccttctagctctgctcatttgcttgatgcatttctgagctttcctgggctgagctgaaggcccagaatcccgctagaatatatcctgactgatcagaggatatgacagcttaccagctaagagtacctcccaggaaacagtctgactaatgtggaacctgcaactgtcagtgtggctggggtctttttaattccagtgagaagctctggctgagaagaaaatcaccactattaaaaaagctgctccccaagcagattagctctctgttaggattttactagtggccattcagcaaggacctctctttacagtggcacttcataggcacactctaaggagaaagtgcagagtagaattccttcagggcataagccaaaatgactctttttctcagggacctgcatgggcctccagcttgtctattggaattgttaagtgaagcctctcacttagtgcctcattagcagagatttcctccaacccagcttttctgtgctcttggtattttactacttgatgtggacctcagagaagctgaactgtaattgaaaatgtttccgatgtgtggaagaaatgaagactgctttgtg

SEQ ID NO: 17331 - DNA, 1022 bp, Homo sapiens
gcagcctcctagaagacagcaggctatttgttaaggctgaagtttcagaaactttcaggtttggcatattgctacattgcagaccctgggagcattacagtggaaaccaatctttggtttgtgaataggaagaatctattaggcctctggtctgaggcagattttttttttgagatagagtctcactcttgcccaggctggagtgtcgtggcgtgatctcagctcactgcaacctccgcctcccgggttcaagtgattctcgtgcctcagcttccccagtagctaggattaaaggtgcgtgccaccatgcccggctaatttttgtatttttggtagagacagggtttcaccatgttggccaggctggtctcaaactcctgacctcaagtgatccacccgcctcggcctctcaaagtgctgggattataggcgtgagccaccacaccccgccgcggctgacttaaccttagatttcagattccctttcaatcatgcccgtttgcttgggtttgaccactccccactcctggatctggactgtttcttcctgttgctgtcagccttggttctagtttatagtcttgtctcctccgtttctgcttatggtgtggacaaatgaccttttttaagcagctggtaataattttacattgactggagcctgtgcatttgctcagagatgctacaatttttagatatttctaagacttctggattcttgaggtagttaaggattaaaaccagaaacagtcgaggttttttaaaagcagggtaagccatgaagtgaatacagggtgactgagtgatcatcagatgagattaattcttttgggttttcttggttttaaggcatctcgaatgccccttgaaaatgtagttttccctggtggtgggcacctgtaatcccagctactcgggaggctgaggcaggataattgcttgaacctgggaggtggaggttgcagtgagctgaaattgtgccactgcactccagcctgggtgacagagtgagacaccatctc

SEQ ID NO: 17332 - DNA, 939 bp, Homo sapiens
ggagagccattggcgtggcccacaaaccttggattcaccatccagactgcagattggatgaaactgtgcacgtttttgtcccttcagttgccttatgttgaatcagttatatttatctgtaccttctttgctacttaaaatatgctcacagtttgtagtcatgtagaaaaggccagtataaaaatgtagtagacttaaagaccccactcgaccatgagactttctctttgtcaatttgggaattattattattaatttagaaatggggtcttgttatgttgcccaggctgaattcagactcctgggcttaagggatccttccgcctcagcctcctgagtagctgggactacagttgtgcaccaccacaccaaacaagaattgattatattgcttctgtgctatggtaccagcagattattcagccatgcttctaaaggcagtctagcctagaggccgtacagctgtttggtttgcatatgttttagcttttcttttggtttttagtatttcctaaaacataggggaaaaaacgaggtcatttctactaagcactaggacctgccatagtgagtttaagtgcctaccttgcagcagttaatactagattgtgttctgtctctgttcaggtaacaggactgcattcctgctcaaggatgattccttgctgctgcttatgttctgttgtttttaggatggagctggttgttattcaccaactaagggaacagttagagcagagatgaagaaattatgaactgttatccttattctgagccttctcctcctaaccctcatcagttaaggttaggaagaacaagatgccataatgcctatgaagacttctttaacaatcttgtttgggtttttttctaggtatattattagtgttttatggtctatgttctttaagcaataaataaattgttcattttaaatgg

SEQ ID NO: 17333 - DNA, 837 bp, Homo sapiens
tctcagcattacctctttggaaaaggaaggtagttcaagaaatgaagagctgttgatgggatgattgaagaaacagctatgagaggattggctcccatcttttgttactcttgggacatcctgtcatctgagaatgaacaaagaccaattttttgtgtgtgaagcttaagggtcatatgtttgcttgtattttttaatgctaatcttgtgaaaataattgacaggcgaaagaaaactctatttagatgcatattactgtacatgggactatgcttttctcaaagccccattaactgcttcctataattttgatagtgggaccacatacgtaaaaatctctcatttgtgtggagtcatttctgatttcaggggagatccttgtgtttatcagaaagggcagaagtaggggaagaataatttggtatccttatctagtgtttgattgtcaatgctggagaaaaatatctgtaagagtgtttatacagtacacttcagttatcttgatctccctttcctatatgatgatttgcttaaatatccatattaagtaagtctcaaggtagggtaggcagcctgagagtctagaggcctttagttataaaggaatctagccagtgaacataattcttattactagactgccacaaggaagaaattaacttaccctgtatatcagggtacaaaaaattcagtgatgtgcctaaataagttataaagatttaggccaatcagaagctaacagcagtttcaggtagaggtgcatgcctaatgttagttagtgtagattccatttactgcattcttctgatcactgaaataaaagctatataagattca

SEQ ID NO: 17334 - DNA, 431 bp, Homo sapiens
gctcgccaataagcttcttggttctacttctcttctccacaagccccaatttcactttctcagaggaaatcccaagcttaggagccctggagcctttgtgctcccactcaatacaaaaaggcccctctctacatctgggaatgcacctcttctttgattccctgggatagtggcttctgagcaaaggccaagaaattattgtgcctgaaatttcccgagagaattaagacagactgaatttgcgatgaaaatattttttaggagggaggatgtaaatagccgcacaaaggggtccaacagctctttgagtaggcatttggtagagcttgggggtgtgtgtgtgggggtggaccgaatttggcaagaatgaaatggtgtcataaagatgggaggggagggtgttttgataaaataaaattactagaaagctt

SEQ ID NO: 17335 - DNA, 18 bp, Homo sapiens
aatgtttattttattgcc

SEQ ID NO: 17336 - DNA, 594 bp, Homo sapiens
acggccctctcgaacacaatgggacggaatccacccacaacgcgcttggtttgcagatgtcaaagaatctgcagagggtgctactgaagatccagccttagccaatcaccacctcattgggtgaaagttccagggctcaatccaggaccacactcttattggccaggcaggggctcccacagagctttgagtaacttcttggttgtgcagtctgcaggcaatgttggcattgtaaattcctcccttgcagcctccttcatgtggtgaggggatcacttcagctgcctgctgtggacaaagaacatcaaattacagcatcacgagtgctattgttgcctgtggtggtctccctgtccaagcgggaccgctttgcagagaccagaggcatatcgcggcttgagctgaaaatgcatttgttgcagcttaggttgaattatttttcgtttgctctttcttctacacgcgcctgatggatagtgaacctattcatcaaaaaagtgcactgctcttctgtctattgtaccgacttaacctcttccacccaagtccgcatctgtgtgtatcatcaataaagttgtgtgctttgattggcag

SEQ ID NO: 17337 - DNA, 404 bp, Homo sapiens
ttggttatgtaccgtcaaaagacttgaagaaatttcatgattttgcagtgtggaagcgttgaaaattgaaagttactgcttttccacttgctcatatagtaaagggatcctttcagctgccagtgttgaataatgtatcatccagagtgatgttatctgtgacagtcaccagctttaagctgaaccattttatgaataccaaataaatagacctcttgtactgaaaacatatttgtgactttaatcgtgctgcttggatagaaatatttttactggttcttctgaattgacagtaaacctgtccattatgaatggcctactgttctattatttgttttgacttgaatttatccaccaaagacttcatttgtgtatcatcaataaagttgtatgtttcaactgac

SEQ ID NO: 17338 - DNA, 279 bp, Homo sapiens
actgagggcaagatcccagtggaggccttcaagcaaatcccctaaaaggagccctttgatgtcatctttgtcttccttctcatcctctttgtttcctcttttcaccagcctaagaccactctaaggactggggttggaggcctggctgaccaagaagccaaagttaacttgcaggccacaggacatagccacctgaagagccagttgttctgtgtatttgccccactcatgatcaccgtttattttcataataaacagtgacgttacatgttgtatgtt

SEQ ID NO: 17339 - DNA, 1219 bp, Homo sapiens
atgtttagttttgtttacccaaggttgaattgaaaaaaaaaaacagtcaatatggatttagaaaaaggaacacctgatgaagaaaaggagaggtagatacagtcagtgtcacttcaggacacttaggttttttttgtataaaaatttaaattgaattaaaagaaggaaaaaaaaagcccaaacttaacctctgagaaaagaacataagaactcaaggagaacataagagaaaaggaaacctgttacagaaaagacaagaatctgtgttttggaatgagtctattcttgggtattgaacttttagttttgtttgcccaaggattaattgaggaaatcagctaagaaaatggactttagacaaaagcaagaggatcagatgaagaaaaggagaggtagatacagtcagtgtcacttcaggaaagctatttaaaaaaacttgaaatttaattgaaagaagaaacaacaacaaaaaagcctaaacctagcctctgaacaacactaacatgagaacacaagaacttaagagaaaaagaaacctactcaagaaaagacagaagagacagtgatttgggatgagtctactctaggattttcaactttttagttttgttccttcaaagttgaaggaaaaaaagtttggttttataaaattcatgttattgtaatttttctaggtggatggctactttaatctctaaaaaagccaagtgaagtaaaagtattcagtatgccttttcctcaagttactttccttcattttcttaaaaaagaaaaaaaattattaaatgtttctcacatatctcacatataatgtaatttccctaaatgaagttgtctctacttctgctcatcaaattgctgtgatagtgaattatttattcatgggagataatttattttaaaggacagaattaccaagcgttacaaaatcagttctttccttggttttgtgttagtgttggtggtattttattgttgtttttctgtgtttatgtgtctcagctttctccaaggaatatgtatgaaataacttaaactgattttttctttgttaaatctaatttgcagtgtatttttgcattttctagttctgaaagtggaaaatgaaacagtctataataaacttagatgatatatagttttaaaacggtctcaaaaagtactgatataaggtcagtctatattctggaaatgtttatattaaagtgttttaatttct

SEQ ID NO: 17340 - DNA, 817 bp, Homo sapiens
ggggtggaggtaggggccaaagaggcttacacgatatcccatacctttaatgcctttggccttccattctgacttctctgatgagattattgtcaaccctgctttccctggtagatatttgccaggcccaatgctttaaccttaagctgatatttttgctttagatgtcaatctcgttaccagcagccttttgacccaactacagcgctctatattttagtagaggattttcacccatgtgcatggaaaagatgttcatgacacattgtaaaaaataaataaataaagaacagtttgcagaacctcgtatacggttatcagccaatatttataaaaatgtaaatgtttgtataatgcatttctgcgcaaagaaaaccctgaaagcatgtacactaaaaagcaggcaatggttattcctgaagggtagccaagaataggtctcacctgtattcaaaaatgagtcctaccacctcttgtatgtacctccatgatattcctctgctgctgtgcacatccctatgtcttccctaggtcgagccaggtcagtgggcactgttgctaggtcctctatcatgttcctgggtcttctaacatgagtgctgggtctgcatactcagacccatactaaaatataatactaaatatttgtcatactgaaaaataaataaaagctgaatacaatacatactaagaaattgaactgtttggtgcgcttacaaaggcaataaagacactcagaattcctgttatcagaacataagatgacaggtaaaattcatattatctctgggactaaaagctaaaggaatcaacctgg

SEQ ID NO: 17341 - DNA, 217 bp, Homo sapiens
atcttgaggttaataatcataaaatccctgctttctaaattcgcatttttcctggtgtacctttaatgtgaaccttttggcattcttctgcaattttctgattggagattgcattttgacctagtctgtaagtttttctgtcagaagaggactttcatcaactttcatggaaagatgtttattgcatactgtaaagttaataaagcaatttaaaagc

SEQ ID NO: 17342 - DNA, 404 bp, Homo sapiens
aatggggatcgcctcccaacagcagatttcgacattacctgagagtcttgattttaggcttgttttttgtaaacccatgtgtttgtagagattttaggcgtcttcggatatcttctcacctatgttccctggctaagaagtcagaggtagccaatgtttccttaaattcatttttaaacttaccattggtgcatatgttccagatggcagatgctgtcaataatctcaccattgatgacctttgtgtatgtagttcttgcatcctatactggataagcctgttttaacctgctatgatgggtgcttccattgcttcataatcttcatgaagttgcatgcttttgcagcttttcacagtttatttgcatttctaatgtagtaataaagtaaccaatataatcatt

SEQ ID NO: 17343 - DNA, 244 bp, Homo sapiens
atcctgatggtttccctaaagttattacggaaacagacccctgctttcgaatttacatgttcatgatgtgcccttgttgtaaacctttacctgtcacttgtttacgtgggtctcctattaccagcttctaattgaatattgtgtttttgaaccagtctgtaagatttttgttagcagaagaattttacctattgcatggaaagatgctcattatagtgaagttaataaagcacctttaaaaagc

SEQ ID NO: 17344 - DNA, 178 bp, Homo sapiens
atgtatttccctgtgactgaaccaggagatctggctggggctaagaagccgaagcccaactcacagggctgactctcatccttccaaaggggccagttgttctgtgcacttgtccacccctgttacccccaggatctctgttccttttcacaataaagtatggtgtcttgttatgtca

SEQ ID NO: 17345 - DNA, 630 bp, Homo sapiens
attcatttttgcctaatattaaaatctggccccagctttctttctgttagcattttctgatgtatctttgacctccattttacttttaatcatctgatgaaattttgttttaggtaatttccttggtaccagcatctcattggattttggattttgacccattttccaggtctatttttcaattggaaactttcacacatttgcatgggaatatgttcattccatgttgtaaagtaaaacataacaggttatggcaaagcagcatatttaatatcagctcacatatgtaggataaaattccaaactttgtgtgtgtgcgtgtgtgtatacatacatccatataacatatatcacaaacttaaccaagcttatttctgtgtggtgtgaaattttatttgttttcttctttttgttctttttgcttatatgtactttttaatgaacacgtgtctcacacacaaaaagaattaaggattttttttacaagtaagagtcaaataatttgcaaccagcttatgagggcaatgggggcacctaaactcttgatgaaagaactttaaaaagaaatgtaaacctcaaattacctctggatctcttagccagaggaataaactggcaattattacagat

SEQ ID NO: 17346 - DNA, 252 bp, Homo sapiens
tgtctttggcctttaattctgatttctctgatgggaatattgccagtcctgcttttcctggcaggcatttgccggcctatgtgctttaaccttaagctgatactttcctttaggtgtcactcttgttaccagcagacttttgacccaactacagtgctctgtcttttagtagaggattttcacccatgtgcatggaataaatgttcatggtacattgtaaaataacaataaaaaagagttttcagaaccatg

SEQ ID NO: 17347 - DNA, 243 bp, Homo sapiens
atcctgatggtttccctgaagttaatagggagacccctgcttcctaaacttacacatttgtggtgtacctttgtcgtaaacgttttgatgttacctatttcttgtgggtctcctattaccagcttctaaatgaatgttgtttttgacccagtttgtaagtttctgtcagcaggagagttttacctattgcatggaaagatgctcattatatattgtgaagttaataaaacagttttaaaaagc

SEQ ID NO: 17348 - DNA, 169 bp, Homo sapiens
ggaaggcaccaaaaggaaacaagctggaatcgctccaggaaaaactctggttacacctggaagatggaagtcgcattgtagattcaagaaattagttttcagtttctcacgggaaccatgctgcttgggaatgtgtgtgatgccttctgtcaataaaaacacattacac

SEQ ID NO: 17349 - DNA, 656 bp, Homo sapiens
gcgtctacagacagctcaccatttttgtcctgtatctgtaaacactttttgttcttagtctttttcttgtaaaattgatgttctttaaaatcgttaatgtataacagggcttatgtttcagtttgttttccgttctgttttaaacagaaaataaaaggagtgtaagctccttttctcatttcaaagttgctaccagtgtatgcagtaattagaacaaagaagaaacattcagtagaacattttattgcctagttgacaacattgcttgaatgctggtggttcctatccctttgacactacacaattttctaatatgtgttaatgctatgtgacaaaacgccctgattcctagtgccaaaggttcaacttaatgtatatacctgaaaacccatgcatttgtgctctttttttttttttatggtgcttgaagtaaaacagcccatcctctgcaagtccatctatgttgttcttaggcattctatctttgctcaaattgttgaaggatggtgatttgtttcatggtttttgtatttgagtctaatgcacgttctaacatgatagaggcaatgcattattgtgtagccacggttttctggaaaagttgatattttaggaattgtatttcagatcttaaataaaatttgtttctaaatttc

SEQ ID NO: 17350 - DNA, 158 bp, Homo sapiens
agatagggagccttttaaaaatgtgccccaaattgatcagtcagtagtgtaagaataactgtgcccctctaagagtgcacacacacgcacacaagagggtaagagacaaggttctgattgtgaaacagagcctttcaaattgaagtgtagattgattt

SEQ ID NO: 17351 - DNA, 315 bp, Homo sapiens
aatattagaaaaatgtcatgaaaatagttgaagagaaatgctcactgcacaaggagaccaagaaaaaccccccacgaaatcagccacaactaaatcgctctggacggtgccgccaggtgaccctacatgtccggagcaacactttgaaaaccaaagacgcttggcagaaccctgttcctttccagagacagagctgtgtaccttgtctaaaacaccgcatctcactcagtgacttatttctcattatgctaattgttttcgctttaaagcgccagtctttctgtcaaatgggacatacaaataaatttctaaaat

SEQ ID NO: 17352 - DNA, 5119 bp, Homo sapiens
ctgcagaaagtgtggcatggcagctttgttattctaaatcttccctggttggttctatatagcttacttctttggctaggttgcctaatacagccatcctttagcatctataaactcattgcatgggagaagttcccaactaccaacctgttgagcaaggacaaagcccaaaagtattccttagtcaaaaagaaacgttcaccccagtctctccacagtttcagtagcctcagagccaggaggcctttaaataacatgtaacccagattaagtgtcattcctttaaggaattccttggcaataaacagaaacttaaaaagatgaccttacttaggcactctgagctctgggacccctctaggtgtcctccagaccaaactgagtggaactccaatttcaaagaactatgcttgactcttaggatgggaattccataaaacttctcagatggctacattttcatgatattgttcactgcctctaccaccacctctcacttctcaaggctgtgggtcctactttcagggtagcagctgtggctggaaatcctaaattaggcttgcatgaactcgtcaggtgccacaagaactagtggggctggagatgggagtgagaagagcgtggcccatggatggaaagaataaaaactttgaaagaaaagatttaattacatgcaaaatagaaacatttgctatagtctgcttggtgttatctgctaggacatttctgagagcaaggtgataacattgcctagaaaccgtttgagtttccctaagaaacctggaagtgaagtgaccatatctcttcacagaaaattgcatattttgttgatgtggttaaatgtagttactatgacataaagatcagaaatcttagcctgtcattcagagccattcaaaatatggtcatcatataactttcaacatattgtcactccacttacataaaccccaaacactagccataatgaactattgttctctccccagacattccatgaactttcccatggccatactctggcccacactattctttccacctgcagtgctccttcttcacatgccagtctaccaaaatccttccagttccttgaagcccagctcagaggtcaccttctctatggagttcttgattttccccaactgaatgtgacattagtctctgtgatgcccctttcttttttttttttttgagacggagtttcgctcttgttgcccaggctggagtgccaatggtgtgatctcagctcactgcaacctccacctcccggattcaagtgattctcctgcctcagcctcccgagtagctggaattacaggcgcccaccaccatgcctggctaattttgtatttttagtagagatggggtctctccatgttggtcaggctggtctcgaactcccaacctcatcaggtgatccacccacctcggtctcccaaagtgctgggattacaggcgtgagccaccgcgcccagcctctgtgatgcccctttctaacagcacttcatacagggtactgattccattatgtcactaatctcatgtgaccctttgttcttgtattcttcaatacctcctactagactgtaaaactcattgaaagcagggatttttgtatgcattttaaaatcttccattgtgcctaggtgctcaataacgttggtcaaattactgagttgattatcaagctgtgatatggtatatcctcagggtgctgtcccttgtacatgacgataaagttattgactcactgtcagcaagacacgtgcctttgggctgtgtttttgctttcttttaataattgatttagttttgtgctaatgataatgatgctgctactgataataataataacaataataaaaattactttcaactggcacatttgatgagtttatattactgatggcatgtttgctattagcaccagttcaggaactgaaatttcacaaacagaatcacactgtacaactgtaccatttgtttcaactctggaattttgaggatttccaagatgacatgtgttatagtttccccctacagatatcttagtaatgccctcctcttgcatctccttactgaaccaaatttgtcctgtatttgtcttacttggttgtagatttagcagtgagaacttctcactgaatgccacagaaattaaagacatggttgttggaggtatgatgtcagagagcatttgccaccaaggttggcagaaaatggctggtccaggagagctgaagatgagcttccacatctgcagatcgggatgtgttgggacagtactcaacttgtggattcaaggaagtatgaacacagagtctgcataaggaaaggaaaaagatgcattcatctcccaagtacactggtgatttccacttatgtcattctgtccatccatgtccctttcttcattttaacttcttatttaaaaataatttcaaacatttaaaaatgttgcaagcataaataaagcttaaagaacacccatgtcccctttaccctaattcccctattattaatgtttctccccatttgctttattatttaagtgtgcactctgtctatacacacacaggatattttttccctgaactatctgagagttgcatacatcagttttcaatattcctagattcaatgtttgtagatccaaattattttttaagagaccgtgttttatctctgacaatgggacagttattacagaatataataaaatgaaaactcacacaatatatgtgatattgtgaaatatatacttggtctttgatcctgtttcttggcatacaactcctaaaatccttagaatttccaaagtgatatctttttgtatgctaataattgactgatggctggcagcctctggttgcttcaggatgggaactagtcaccaggaagaccaaggcaccattagagggttgggacttaacagcctcattcccgacctccagggaggggagagggatggaaggttaagttgatcaccagtggccaatgatttaatcaatcatgcctacgcaatgaagcttccataaaaaccccaaagcactgggtttggagagcttccagatagctgaacatgtggaggttcctggagggtggtgacccagggagggcacagaagctctgagccccttccgcagtacctcaccctatgcatctcttcatctctatcctttgatatatcctttataataaagtggtaaacgttaagtatttccccaagttctgtgaccctttctggcaaattaaacccaaagaaggggtcatgtgaactcaaacttgaagcccatctgtcagaagttctggaggcttggatttgcgactggtgtctgaagggcctgggaacagtcttgtgaaacctagtcctcagcttgtgggatatgacgctatctccaggtagattgtgtcagaatggaattggagtacacccagctggtgttcgctgcagaactgattgctcacttagtgtgtgggaaaactccacacatctggacatggaaatattctgtgctgattgccgtggtgtaagagcaatgcaaaaagtttgggtattttcccctcggagtatattttaaagctaaattgctaataattgcttaaatttactatatttgcctttataaaaactttatgtatgttgaagcttgaagctatgcaattataatataaacatggatttacaactaaagcatgttataatttaaataattgagtttttcaaatcggttcatatgaaatcctaggcaatattgtaaaattatacagacctgtcaactttttccacttaaaagttgtgagcaaaatttaagggcatagtcgttttcaagtaattttaaatgtcaatgttaatatttagtttagtgatgttaatggagctatgttttctgatattaaaaatgagttttaggagttgagaccaataaaataaggaggtaataaatatctatatctgtttaaacacataaaatatacaatttaacactaaaattacttggtataaaaagtcaaaaaaaagaataaaaagccatcatacaacacaatatatgcgtgatatatatttttctctaaatataaactacatcagcttttataaagctcaagttgaaataataacgttttatgacaaatcattatatggtatattctgacttaattttgcatttacaatttatttttaaacactaaatagcattataattttactgggataactatatatagtgtagtatattaaagttaataaaatgacgttgcatatgagagaaaaagcataataaatcagaaacaatataaaaagctttcagaaaagataaaaatattgtatttctctagtctgttcactctccagtgtctctggttctttcatatcatcttcctttcctcaaatcttttaatactccctccctcatcatttccaactagtgaccctactttctatttcattaagaaaacagatacattcagaagagaactgccagtttaaagaacatttacaaagccatcacccatgtaataaccagccagagcaagaaatagagccctttaataacctactcttctccccccaccactgatgacaccgctccctccatcttaggtgtagcccccatgctgacttttgtaataataatttctttgcttttgtttataagttttcttccttataagcatctctaaacaacagttttgttttacagatgttcaaacattaaatgctttttagacttggaattgtgactatcttgtttcactccacattgcttgtgagactcattgatattgcagatagctgtagttgatccatttttattgttgtacagtttaccattgtataaatataccatgatttattcatgataactttgaggaacattctggttgtttgcaggttttatttttacagttcattagttttattgatgtataataattgtatatgtttatggggtatatgtgatattttgatacatgtgtacaatgtgtaatgattaaatcaaggtaattgggatatccatcagctcaaacatttatcatttctttgcattgggaacattccaaatcttctcttctagctattttgaaatacacaataaattgaatactgtggtca

SEQ ID NO: 17353 - DNA, 189 bp, Homo sapiens
agtaaggtattcataacagtttttccaaagttctttcctgccagatagaaattgtgcacagcacagcatcaagtaattcgttagatgcttgttaaatgaagtgggtaggtgaacaaagttaacgaatgccctgttatttttgtaggccacataattgtagtattttcaataaagatgtgacttaatagt

SEQ ID NO: 17354 - DNA, 35 bp, Homo sapiens
gtgcagaaatgcaaaatagaaccgaagcatgtata

SEQ ID NO: 17355 - DNA, 294 bp, Homo sapiens
ttgggaaaaaggccattggctaattgcacgtgtgtattgcaatgggaaataaataaataatatagcctggtgtgattgatgtgagcttggacttgcattcccttatgatgggatgaagattgaaccctggctgaactttgttggctgtggaagaggccaatcctatggcagagcattcagaatgtcaatgagtaattcattattatccaaagcataggaaggctctatgtttgtatatttctctttgtcagaatacccctcaactcatttgctctaataaatttgactgggttg

SEQ ID NO: 17356 - DNA, 745 bp, Homo sapiens
gcaccagactgtatacccttctcttctcttatcttctgtctgttctcttttctctccctccctcacgtctctctctctctctctctctctctctctctctctctctcaccctcacctttatgccttatatagagaatctctgtgtaaatcctggctcataatcagtctcctttttatcagttttggtgtggagaaagaggccagtttaaataggctttcaagagtctagggtcagaaaagcaatagtcactaagctaggtgacctgaaagctttaattttcatgacctggatatgtggtctattgtatatctttttctgaaatggtttgtattcatttaggttagatcaatcagcagatattgggtccggtataccaggtattattttggggtaagctaacaagtacaactcatgtttgcagccttcgaagatgtaacaatctcgttggaaacataagacatacatcacattatacacaaaagtgtatgatatgtacaactgagtggtacagatatgacatggaagatctgggggaggaagttcaaggaaggcaccacaccagaaatgggacctaaattaaggcttaaagaatgagcatggccacactgtcagtgagtgttctttaggtggtaggactatggttgatatttttcttcttcctatcttcctgcctttttcagattttcaatattaaacttgttattcttacattggaaaaaaataaattgtttttaaaaagatcaa

SEQ ID NO: 17357 - DNA, 386 bp, Homo sapiens
aatatatataaattgtgggtcctggatggtctttcttgaattggaatcttggatctaggatttatgtatagacaccagtttgtttggagttgaagaggaaaaactaactgagggaggggaaaaaagtaatttcagcttttggagagaactggtagaaaacattttctattatataattgaagactatataggacagatgatatgctgagtatgaagggtaaagtgcaaagagtattattttctcaggatgaattacaacggattattcctaaggatttttaaaaatctttataatttttctggggtcctcaatatttgtctctagagataacattctttcttagactgcttcgtatacacagaaataaaaaactaattaaatgttg

SEQ ID NO: 17358 - DNA, 857 bp, Homo sapiens
gcatgctgcgaaggaaggtagaagtggtaacacgggttttcgaggattatcgtcacgaggagcatgcacacaatgtcaacactgctttttagtgaatgaccatatcttcagcatgtcgtttctggattattacctacaaattctgatgttaaatagagtagtatttatacttaatatttcatcttgatcataatgaattgtgcatcctttttttcatttaagtattgtactgttgagaattataccttagttttgtttttagtattagaaaatcaaaattatactagcccctttgtccagacagcaacctcttagatgctgactctatatgtgtaatttatgtcttactctccctggcatcagtacacatcatccttctcactccagttgaatcatagggtgatgtctgccaaaagtacatgccaacctatatagtgctagatactgtaaagtctcttctcctcaaaggaacctactgtctagtttgagatataattaatgcttgtctgcataaaaacaatatagataatataaagaagtgcagtatgaattatagaaagtgtgttatagagattcagagcagggaggaaaagttagggtagattattattaaagggttaaggaaaggtaagtttcaaggaatttggttatttttaatgtatggatatactggcattttatttggttttagcatatgatttatagttggtgatttccgtatatttgtttgtttttctttttttttgtttgtttgttttgttttgttttaaataagccttgttcttaggtttggaacagtctggtctcctgtgtttcatgtttcacctaagtcataaataaaggtaatgtcctaaaaa

SEQ ID NO: 17359 - DNA, 1289 bp, Homo sapiens
gtggctctgtcctcagggtgggcagagccactaaacttgttttacctagttctttccagtttgtttttggctccccaagcatcatctcacgaggagaactttacacctagcacagctggtgccaagagatgtcctaaggacatggccacctgggtccactccagcgacagacccctgacaagagcaggtctctggaggctgagttgcatggggcctagtaacaccaagccagtgagcctctaatgctactgcgccctgggggctcccagggcctgggcaacttagctgcaactggcaaaggagaagggtagtttgaggtgtgacaccagtttgctccagaaagtttaaggggtctgtttctcatctccatggacatcttcaacagcttcacctgacaacgactgttcctatgaagaagccacttgtgttttaagcagaggcaacctctctcttctcctctgtttcgtgaaggcaggggacacagatgggagagattgagccaagtcagccttctgttggttaatatggtataatgcatggctttgtgcacagcccagtgtgggattacagctttgggatgaccgcttacaaagttctgtttggttagtattggcatagtttttctatatagccataaatgcgtatatatacccatagggctagatctgtatcttagtgtagcgatgtatacatatacacatccacctacatgttgaagggcctaaccagccttgggagtattgactggtcccttacctcttatggctaagtctttgactgtgttcatttaccaagttgacccagtttgtcttttaggttaagtaagactcgagagtaaaggcaaggaggggggccagcctctgaatgcggccacggatgccttgctgctgcaaccctttccccagctgtccactgaaacgtgaagtcctgttttgaatgccaaacccaccattcactggtgctgactacatagaatggggttgagagaagatcagtttgggcttcacagtgtcatttgaaaacgttttttgttttgttttgtaattattgtggaaaactttcaagtgaacagaaggatggtgtcctactgtggatgagggatgaacaaggggatggctttgatccaatggagcctgggaggtgtgcccagaaagcttgtctgtagcgggttttgtgagagtgaacactttccactttttgacaccttatcctgatgtatggttccaggatttggattttgattttccaaatgtagcttgaaatttcaataaactttgctctgtttttct

SEQ ID NO: 17360 - DNA, 216 bp, Homo sapiens
tgctagcctgtggtcagatgtggaggcccagggaatagaccctcaagagcccccaagagacaggagagactccgaactccatcagcagagaagacctccagtatatcgcaggccagggaactgggactgcccgtggtgtaaagctgtgaatttttcatggagggaaaattgcttcctctgtgggaggcgaatctggctgcaaaagcctcagtaaat

SEQ ID NO: 17361 - DNA, 911 bp, Homo sapiens
cctgtgatgaggagagagtggaagaagcaaaactgctggtgtcccaaggagcaagtatttacattgagaataaagaagaaaagacacccctgcaagtggccaaaggtggcctgggtttaatactcaagagaatggtggaaggttaaacagcttggatttattcttactttgtatgttgtgttgttgtccccagtgtcctacaaactaatgtatttgtgcacaagacatcatctatgaatgatgaagttttctcaccttcaaagtcttataaacatgttgactcttgttcctgctgagttacttgttcgaagcttacagcttgttttccaggcatcgaataactgttgagattgttctactgttgtcgtatattcttctatattgaattctggttaatttggagtaactaattctgtggctgttgtgagtcttcagcaccctcccatgtaccttatatccctctctgaaacagaacagctccaatagcaacaagctagttgttctgccagatgtttctatgtggattctgtaatgttcctccatacagttaaaacatcctaacttgtttttcaagctcactcaggcctacgccaaacgtttctgttttttttaaccatgaggtttaatttatttttgtgataggagggatatttacatattttagtggaccacattttaagttggatggtgtgctctaaaatactgaaaaacaatagcccatatacctatgtatttgtttttgatgggttgtttactctgaaataaaatgtatggttttcttaaaaggaagttttaaagtacctattttgtgtcatcctgtattgaaaagaatgtcaagcttgttaaaatgacatgtaacaaaaatgtattttgatttgtatttcagaaactaaaaaataaaatgttgaaag

SEQ ID NO: 17362 - DNA, 1393 bp, Homo sapiens
ggtggcacctgccactctgccccttgccctcccctgcccctcacaacagtcacctcacaaacctgaatggtctgaagaaggaaggcctgagcccctttgcctgtcaagttgtacattggagtctcatttgggctagactaccggacactcgtcaccccagccctcgggtccatagagatgagcccaccctgctgagatctgctgtcctgtttctgtcaagctggtgctactgtttgatttggatgattgtgtgactattcatggctacctcagaaagatttgatgggccacaactgtcttagactgctagctttctccttaccgtcttgatcggaaagctcttcctaatcgctaatcagtcatttcttcatgtacagaggtcagcacacattatttggcttaaaccagaacccagtgtttccacacttaaattctctaaccgaatattcatggatggctcaagtctgcacagagcaagtcctcactcttcaaggaggcccactgtgtctaggcaggcaagagaattgaaatgaggtgccacccagtagcccagagtgagctttagctctctctagaatgagcaagactgggccccacatggcttagagaggcttgaaggccagcagctgggttgggggtggtggtcattaatggcatatggtcctagacaaaccatctcctccttgccggctccccctccagccagagacagaggatgtggcctggttcaaagtaaagcagaggatgcaacaaatgtggccaagcctatcaaaggaaatgagaatgacagccttttttcctgggccagaagtagaggggtgggtgcgtaaggatgtgtgagttttgcttttgactccaggaacaaaaaggtaaatcccacatcccagtttctcagaagtccctgtttattccaaatgccatccagatgtgtgcaatgtggcaaactgaagctgcacagtgttggtttccttgtattctgaggatgttaaagactttgttaaatggttatccaattgctctttcacaggtagcctattaaactattttaatatgtttttttaaacctcataaaaatctagcacactcttctcttgagcagttagcagacctaaagcaagcctgaattggctatgcagtacattgtattctgtttgggggaatttgttttagccattttctttaattaccagttttccagaacactcttagctatgttgacatgaggcagttccttccaggtgattctgtttccttaagtattatataaactgtgccaatacagacaaagcataatcaatataatctgaattattgttatctttacctcctgagtaataagcatggtgtcagttttgtacatagcaaataaaataaatgaaatctgaacatgtga

SEQ ID NO: 17363 - DNA, 87 bp, Homo sapiens
ttttagaattaatttccctaaagtgaatggtcattgtctaatgattcgatgcgctacagtctacagtgttagggatactatttcatt

SEQ ID NO: 17364 - DNA, 94 bp, Homo sapiens
gggcaaagggctccaggatttgaatcttctcttggtgaggcaatgggaaagctcacttcagttcaagaaattgttctgcctgggcaagaaatta

SEQ ID NO: 17365 - DNA, 892 bp, Homo sapiens
aaccacagccccagattgctggttcgcgccctcctcatctcgctcatccctgggcgcgcctcccaccttccacccccaactcccttccagggttcgcctcatctgaggcccagataatggtgagaggccaggagaccttgtctggaaggccctggaaggagaagcaccaccttacccattcgggccagtttctccctcttcacccctgcgcctccacccctaccccgcacatccaactgcactaaactgcctctgctctcttgtcttcagacagccctgacagcacgctccagccctctgggaactgaatccaacacgtccaacacttggcactgaactgaagcaatgcattctatcagaactctgggccgtctaactggcagctgctccaggggctgccagggactgctcactctgcagagccaacgggcttgccaggccgactgcagcagctccagcttccagttgccttagggacagagacaaaggaaatgaagagacctcagacatcttttccctccctctctctttcagcagggagctagcaggacactaggaccagtctgtgggatagaatgaacttaatgggggacggaagggggaggagtgctcaacggggagggaaatgatctatgactccaaccgtatgattttcttgcctccccagttttcatcccagtggtaacgcctgatttttggtagctatgccatcttctgctgaggattaccattactgggtgtatcaccccagtacttccaaatgcctctcctctattgattcagttgttattgcagtgtctgcttcatccgtggaacttgaggctcagatgccccctgctctgtaaccctggggaatgtcagaggcaggtaataaaggttgtttaaacaataa

SEQ ID NO: 17366 - DNA, 2692 bp, Homo sapiens
aatgttgttgtcttattgacagttgtgcaggaggtagcctggtggttttcaacctctagaattttaagcctttgttgaactgttagaatgtaaggtatatcattctaaagatagagtaaaaagaaaacaaaaccaaaagttattaaaattgttgtccggtttactttaacttagttttgcatagttctagtgcagctgaaattgaaaagttatttccctttagctgtgttattatagagcagaaattctgtttttaaaaattagcctaagatatacttgtttttgtaaagaaaaatatttaatgttgaacaaaataaattggagttggagtagaatgtagtttgaggaaatttgcagcttccaatgcctcttgtcttcctatttcagaagtttaaatattaagcatgacagaaaatatgtattaacactactcaaagcaaaagtgctgcagggctttaaaattctcttccaaccatttatcttgaaggaaaaattcaatagtaatataatacacaaaatcaaataataccttagaaggtattaagattataattgttgcataggttagatatagagtcattgtaatgttgtgaataattacagtgcctaaaataagaatagaacaacatatacaacaccaaaaaatatctagtaatatatttaaagggaaattgagctgctttttttgaaactttgagatctaaaaataactgtaattatttgaatgactaagaggaaagtacattttttgaaatgctgaaaattgcctttctgtgtttattcaaactgaaaagctgagaccaagagcaaggaaggtaaaaagttaacaggcaaacattttctcttagaaaaggtgataaaatcataagtatttggaattagaacccttgcacagcactgaacctgggaaagagatttaaactctgaatttatctttgataacagggattgattttaaaatgtacatgtattaaattacatttgtaatttaaggtctgtttgctgttgctgattttattcttgatcagtagtttgcatttcagaaagcctttcattttgctttaattttagcaaagcgggttataatgaatgacttccccaatatcttgcttgaacttacaggtgattaacttggatgagttttgggaagttaaagggaagaaaacactgttatcattttttcctgtttgggaagagcttagaaactggaaatactagatttgggagaagggcagagttacttgataagggactgatgtttgtgcagtaacttgggagtgtggtttctttttgaatctttaattaaaacctgggattatatatccctgataaatattcacacttgaaccatagttactgtaaaatgcaaaaaatcttaatactgttattctttgcactttttcttaatcattttttatatatatgcatatatatatgtgtgtgtgtgtgttgcttatgttgttttgtacagatgtgggccaccattgcaacaaaatacattctttttgctctaaaatatttatgaagaaaatacttaaatgttatgtatatggtggtaataagggaaaaatcaagtattataaacaagaatgaaggtttttgtaaagatttctgttcagcgttttgcaaggtaaaattttaggcaagttttccctgaagttatgtgtatgtgagtattctcattcttcccaacttgcctttgaagagtgaaataccattattatcaagtagactactgttcagcttttattcctgccctgctgtttatcccttaagaatgagtttcttagacttttccaatatgtgattttttttcccatttagaatggtgattttaaatgtgtgagtgcatgtactatcttatctcagatatttgcacccccaatctgcccccaactcccaaaagctagaacactgccaactgatctgttataggtcctttagaaacacataattaacacttaaggttgggtgctgctaattctttgcaaaaatccaaatattgttaagggaccagggagatgccactaccccttgattttccatctaaaaatatacatgtttatgtaaacaaatctttccatatccatagtgacttttcaagtatttaagcctaaagattttgatctcacatttttatacctgtttaaattgctcacagttattacatacacatcagccatcaactaaagttgtactttaaaaatttactacaatatgtacatttctaagtcaaacacttgtgacttttgctttaattccatgaatgttcctgcctccttgatatttgtatttattctttttttctctagagtagaggtataattgtgtgatatttcagaaatacagataaatgattcaaaaagtcacagttaaggagaatcatgtttctttgatcatgaataactgattagtaagtcttgcctatattttcctgatagcatatgacaaatgtttctaaggtaacaagatgagaacagataaagattgtgtggtgttttggatttggagagaaatattttaatttttaaatgcagttacaaattataatgtattcatatttgtactttctgttaaaatgcatgattgcagaattgtttagattttgtgtttattcttgatgaaaagctttgtttgttcttgtttttaagtttgcactcaaatcttaagaaataaatccacccatgttatc

SEQ ID NO: 17367 - DNA, 4333 bp, Homo sapiens
cactgagccgcacaaccagtcactgggcctctctgcagacctcttcccaggagaccctacaccttcttggtctagctatctcttttactgtaccattttatgatgatagtttccgttgccatggtgaagcttcgacatcgtcaactaagatcatcatggtaacgggtagaaaaatggcatttgttaagatcctgttttattattttagatcgttgattttttttttgcagcatatataattttgggtttttttttccttataatattatgtagaattttgctttgctgtctcagtcaggtttctgtttttctgtcctccttgcctttcttcccgttttgcttcctgttttccttcttccttcccgttttccttcttccttccctgcctcccttcctttgactgtggatggaagaaagtgtgcagtttttagggattttacttaggttcgtctttagttttcctcagtaagatagttgttttttgatacctgagtttgggattaattcatatcaaattcaggtatttgtatattactcttgatttttgtctgaaattcactttgctatgacagcctagtagttgggtcttcactccttaagtatatgtttttcccatggtgaaaatacatgaactttagttctagtagtgagcattcaaaggtccgtgatagggcttgtcacagagagagagaaatcatttatccctattgtgctggttatcatagaagagactgcctcaccactttatagaaccaatttgcaaactaaaacactgtttggagaaggtacaaactacctttcaaaaaggctacaggaaacattttatgagcagcaaatattaggaagagagcagatacagaatttagtgcctttgagaagaatataattaagtggaattaagaggggttagaaaaaaggcaatttagaaaaatattcttgtaaaactttattgtttctatatgtgaaacagaagattagacaaattccttactcttaagtatttttttaagctgaaaaaaaattattttgagcaaataaccaataagagacatttgtctattttatattaatttaaatttgttagctctaggtttcaataagtcatgattggctagaatccattttagctaccatctaaagatatggtaaagataatttagtaaaacaaaagttcatatttgccatgatttcagatatgtttgtcatggggacaatattagagttttagagatactataaaatagcttgaatttctttctgcactacatacttttgatagaaacacatttactacattgataagatgttatgtcacacctgtgaaaatggagttggcattcagatatgctatagttagagcccagctcatctgcaagtatagtcttcccatgatgcatacaaagataacttactgatgtcgataggaggtccatacatatatccccaggaaaaatgacagattattctggaggaagatgaccttcattttatggttatgtgtgtgtgtctgtgtgtctttggaaaaatatatataattttttcaaataggaagccaacatatcaagtgatgaattaaagtatgctgcagaatatatattctaaaactacaaaaaagtcactgaatatcaaaatgatacagcttatacatatagttactgtgacaagtgacagactgctagttcagaattcaaaaatcctttcctagtttgtgagataatgggctaaattccttctgcctgccactggggcaaagcaaattgctttagtttttgatgagagttcttagaagtttgttggtattccttcatccacagcatccattgttgaaataaccattttcagttgtgatgccttaactaagaagccaattgttagcctgaaatgcaatcttggtagccagtttcaatgaagctagagattagtcagaaaaagttagctgttgggctttagaaagggattttgagtcctgtcatttctacttgggagcattttggagcagattagtctttcagtataaaaacaagtggctacctgatggaaacttttcttacccttatagggaaactgagcacaagctgaatgatattgtctgctgcaaaaaaaaacaaacaaaaaaaaaacaaaacaaaaaacaaaaaaaaggaaaaaaaggtaaataaaacaagcaaactgaagagagacaaaatagaccaatattatcgtgaaatccatcttatccatcatctcatcggttcaacaggctcctcgtcctgggtgagcttatggttagaagtttttttagcaaagatttattacatacatagatgtgtgtgtgtacatatacttacacatacatacatacatatatgtgtgtttatttaacggtgctaatcaatcttgagcaggtcacgtgactggtcatgcggactctaaaatcatatcagattttttaaaatccttgatatatgcagatgttatacagattttcttagcagtgtaataacgttaaactgaagaaataaccatcctgcaggcttcaaaggacgaggtcagcaatatttcccaacatggcttgggggaaaaggatagttttgtctccttttgtattcaagtaatgcaaagtgcatttttgtctctaagtagcttttgactaaaagactttgtagtgtaaagggtgttatacaaactgtaatggtgtgcttcaaacaaatgctagaccctttcacctttgtcgtatatacaaagctgttaattatgtggtatgaattaactttgaacatgttgaaatatgtagcatgtctttaactcagacgaagattctgattgcacaggttgtgttctagccagttgtgatttatttgttcagaaacacaaatgtgaattgcactcttatcatcagaatattgtatgagttcagtgatctttaaacagctcagaagtaatacttgaacttcatttgagtagcacaaagtttacatagccccttttaaatgttaattcgttccatttaagttttccattttcagatgcaactgggtatttttcctcttggaaatagtacgtactttgctttggtatgtagcaaaaggcttccatttctggaagggttttcttgttcttaaacaaggtcagccaggtaccagattctaaaagaacaaattgtcccccacccctcaagtggccttctgactgcacgagaatgtgctactaccctctgtagtctcccctaacacgagaggtcagtgaaattgatggaggaagtgcaaggcttgcttcccctcacccttaaagcttaaagcagttgtaagattttcagtccagcacatacagtcccagtgcccagcacaccggaagtttgtatactggcctcttatcttgtcttcaaatgtgcaggaaatttgaaactgtcatctggaataggttccatctcttatgtgtgttagatcaaaccaaagaagcccccagccatgcccaaatgctgcttcaaaagcctgccttccagtccttacaaaaaccttgcaggattaaatgtgttaacttttttatttttgtacagtttctaagtgatttttgctagtgatgttaaaatgaattaagtttatttgaggggtgtgagcacctcctccatttaaataaactggtgactttccttttattttttaaaagtggaaacccgttgtgtgcctctcgatttaagggtttctgatgacattattcttaagaccagcattgatcctttatatacaaatatatgttttccttgttttttattgctatttcagaagaaaatgaaccttttattttgctctacccagtaactgcgctggtacatagacgcactgagcaaacaaacttttgtaaccacctctgactacttttgtatatcaaagttgattacttttgaaatatttggatctagtttctaagttattttagtgttttatatgttccccaaaattactttgaatctgtcaccagcataatgagttcttggtgatacaatggtgagacttgtaatgagcaaaaagctacctggagtagctcctcttttccttctttcttagtaacctgttttttgattaccgtaagacatcacagattacctgaaaccccttccagtataactaggccctccttccttccacatttaattgcttaatagtttgaagaaactattggaaatgggcattttatatgacatgtatggctttacaatattaaatatgagcaaaaagaaaaaatatgagaaggtttatgtgggtctgtaaggtatggctgtggaaagatattgtagtagttttgacactattgttattacctttaaaatcatttacccaataaaatgttaaaaccg

SEQ ID NO: 17368 - DNA, 985 bp, Homo sapiens
gcaagacagacagtattggatagggtaaagcaagaaaactcaagctgcagctggactgcaggcttattttgcttaagtcaacagtgccctaaaactccaaactcaaatgcagtcaattattcacgccatgcacagcataatttgctcctttgtgtggagtggtgtgtcagcccttgaacatctcctccaaagagactagaagagtcttaaattatatgtgggaggaggagggatagaacatcacaacactgctctagtttcttggagaatcacatttctttacaggttaaagacaaacaagaccccagggtttttatctagaaagttattcaagtgaaagaaagagaagggaattgcttagtaggagttctgcagtatagaacaattacttgtatgaaattatacctttgaattttagaatgtcatgtgttcttttaaaaaaattagctccccatcctccctcctcactccctccctccctccttctctctctctctctctctccctccctctctcacagacacacacacacacacacacacacacacacacacgcacgtccacactcacattaaacgaaagctttatttgaagcaaagctagccaagattctacgttacttttcccttgactggatcccaagtagcttggaagtttttgtgcccaggagagtaaataactgtgaacaagaggctctgcccttaggtctttgtggctgtttaagtcaccaacaatagagtcagggtaaagaataaaaacactttcatagcctcattcattcacttagaagtggtaataatttttccctaatgataccacttttcttttccccctgtacctatgggacttccagaaagaagttaaattgagtaaaatcatcagaaactgaatccatgtaagaaaaaataattgttgaagaaagaagttgatagaattcaaaaaggccatctttttgctttcacatcaataaaatttaccaagtaat

SEQ ID NO: 17369 - DNA, 1473 bp, Homo sapiens
atctgcaatcccagagaatcctgacaaagcgtgccacccttttattttccgtcaggtgccaggtcttagttaagattcacaatctttagaaagaatgagattcacaataattaactcttcctctcttctgataaattccccatacctcccaatccaagtagcatctgtagctacataacctatatacctccagcagctggacatggggaggcgacagtcctatctagacatcatacacatttgccaagaaaggatctctggggcttccgggggtgagattcaagtaggacaataacaagaggctggacaccctacagatgtctttgatgttttcagttgtttgatatatctcccctgtagggcatgttgaggaaggaggagggctgatcaaggccaagctggtctagcctgacatcctagctcctgactgaacactatagacttcccagcagcatttcacccagcagccagagccggctttaagtccccaacccttacagacaccactgccaccaccaccaaccacgaccaccaccaccaccaccactcaccaccatcatcacctccggaaagtgtagtcctgccctaacccaagtcacccccgacagtaaattttaccttcatgttgagaaagcttcctggtgcttaatcaagagctggagttcaatgagtcctagacagtgagaggggcctgagcttcagctcaatggaagcctgctgtgtgccacaagacggaaaagtggaagaagctgcagtgggagacaaagcctcggtcccccacccatccacacacacctacactcacacacgcgcacatgggcgcgcacgaactaccattcaggcagtcagtgggcaagaggaaagataagtaagtaccatacacacctaaaagatgagagaattcatccagacatattacagccagtttggggcccctgactgcaatgtgaaacctctcgctgctgctaggtttacaaacaagcccattgtcctgtgcctcctaatatcatttgtactgaagaccccatctggggacttgagactttggtcccagcccagactcctcagacttttctctcagttgggatgcttcactcgctgggggtgtttgtttgccctctcatttttcagtacttctacagaattttctctagagtcagtcattatgaaatgtacttccctccatcttaacctatcaactttctgcccctccttcaaggcccagtataaatgccacctcctccatgaagccttccctaattccaccccaaacccccaccttcaacaatatttcaacgcttctgcaatgatgaaaaagaaacatagttgtagtacttagcctacctagaccagcaagcattcatttttagctcgctcattttttaccatgttttccagtctgtttaacttctgcagtgccttcactacactgccttacataaaccaaatcacaataaagttcatattcagtac

SEQ ID NO: 17370 - DNA, 7907 bp, Homo sapiens
aggaggggagagtgctcagagtccagagtacaaatccaagcctatcattgtagtagggtacttctgctcaagtgtccaacagggctattggtgctttcaagtttttattttgttgttgttgttattttgaaaaacacattgtaatatgttgggtttattttcctgtgatttctcctctgggccactgatccacagttaccaattatgagagatagattgataaccatcctttggggcagcattccagggatgcaaaatgtgctagtccatgacctttcaatggaaagcttaggtgcctgcgttatatttgccctgtctaattttgcccatacagtcttccttctgtagagggctgtttacatatacagcacttaaaatgtttgtgtgggaaaaaaaaaactcattggcagatccaagaatgacaaacacaagtgccccttttctctggatctcaagaatggtggaggaccctggaaggacagcaaggcagctccccagcctcactcttcactcctgattgaggcccgggtttgttgtccagcaccaattctggctgtcaatggggagaaataaaccaacaacttataattgtgacaccagatgcttaggatcctggtgctgggttagctaagagaatagacagaattggaaaatactgcagacatttccgaagagtttataaagcacagtgaattcctggtcaatctctccactgaggcaatttggaatcaataagcaattgataatagtttggagtaagggacttcatatacctgattcctctagaaggctgtctaacataccacatgattacatgaactgtatggtatccatctatctctgttctattgaatgccttgttaacagccaacactgaaaacactgtgagaatttgttttcaggtctgacacctttcagtctctttttatagcaagaaatcaatatcctttttataaaaattcatgtctgtatttcaggagcaaactcttcaggctccttttttataaactggtgatttttcttttgtctaaaaaacacatgaagaaaatttaccaaaaaaaaaaaaaaaagcagaagaataatgtagtttagaaattatgctgtcactgccaaacagtaacctccaggagaaaacaagatgaatagcagaggccaattcaatagaatcagttttttgatagctttttaacagttatgcttgcattaataatttcaatgtggaccagacattctaattatattttaaatgaaatgttacagcatattttaagcaactctttttatctataatcctaatatttcatactgaagacacagaaatctttcacttgtctttaacattagaaaggatttctctttactaaggactgatcatttgaaatagttttcagtcttttgagatacaggtttataacactgcttttttttttctgtaatcatagcccataatggcaaagacaactaaatttaagtgaaggtcatgcatgccaattctgtgtttgcttttagcagatatgaagatttccttatttctttgtaattgtgcagatattttgaaaggcacagcattcgaagccaagctgctgtttggctactgaatggcttgcagttgttcctccactctaaatggaatgagcttgctgtgtgtgtgtgtggtggtggtgggagggggtggtgcatgtgtgtgtgtgtgtgtgcatctgcagctgcttcaaaattaggaaatactacaggacacccctgtaatggattggtggcaactgggtggcactgctgatgtgcactgtgtaggggggaacccagtggtggtggggtagctcagatgcccctagacaagcttcagatgtctgtagctaccagaaacattttcggttcaggaaaagtgagatgatggtagtactggtttctggtgaaattgaagaaccccaaatgatgaggatctctttttgccccctctcctttttttgtagacccattcaaaaccattaataagcccattttactaagcccctatttctttctagaagctcagggttttcttagtgcctcccagaacattttgtagttaattgggaaaaagtgatacttggattagggggtgtgggcataaagaatggtgggaggcctgattttaaacttcaggccagaacccccaatgactccacccatagtctcactttaggtctcatttagtccatcacctttattttaagttgaggaagtggaggctggtaaagagcaggaccagaggaagaatccagatttccttatgcttgggcctcacactagctctctgagtatttccttgattgcggtatatgtactactagaaaataccaaatggatatattttctttaggataacctttgaaccaacaatcttcaataacaatagtacatcttccatcttacttttaatcgagtataaggaaatgtttctttatggccattttggagggagcaggggatgaggcttggcatagtccaaaatttaagtctccaataattaattgcattttaaattggcccactttcaaggcaattttttttgtgtgtctgtaactgagctcctccacccctgtcattcacttccaattttacccaatccaattttagcactcaagttccattgtgttaatttctgcacggtcaacaaacatcaagtcagcaagcatttgccaccactccctatacttctccctccttcttacacacacacacacacacacacacacaatccatctcttgcttgttcctacctcctgatttttcttccctacagaaatagaaatagggacaaagaaggggaaaatgtatatattggggctgggctgaacaactaacttcataagtagtattaactaggggtaaattgagagaaaagctccttttctcttcactgttttggaaaggatagccattagcatgactgctttgtgtccttatggactttagtattagcctagattgaattatagcgttttctagctggaaggaaccttaagatcacatcatctactcctctactccaaatttctcattcttcaggccaggaaaccgagacacagaggtaaagtaatttccccaaggtcacacagctggctggggcaggattgggtttacaacccacatctcctggctcttattccagggccttttcccactaagtagtattgccttccattaggctcctgagagttatttctcagggtcatgttgcatcttggagccacatgctgctgccctgatctcagtgggaaatccacccagcaacctaatacagccccttttccctgcattcacctggttcccatccacatgggttgcagatgtccttgaagagagtgaggcattgagggccaataggagcaatggggtccctggccttgtccatctgattcaggagatcactgctccatcgtgaggagccctctgaatagccccccactgaatgcttgccttgcccaaatggaatggaggaagattgattttctccatcagttcaccttgtgtcatctcataatggttggtctttccaggctgagggaaatgtttcttgtttccagagtagaaaaagaaagagtggaacaatagctttgttcatcctaactttctgagatggcttttcaacattttaaaaaaactagtgtggctaccattcactggcaatgatttcttttagaatatgggagtaagatgagctagagaaaataacctggtctcactgtggttgccctcatccacaatgtccccaaagccatcctgctctgatgaggacaatttccaggtataagcaaggggctttgtgacaaaaatgtaccctggctgatgttaaacattggctcctgtgtttgcaccaaaatagcaagctgtgtgctctatacactcttcccatcgtcttgtgtacactgctcctgtggccttccacagcagaaaccagggcaaaagggtccaaacacatggttttccttgctgcaaggctcttcctgggaactaagggggtatttattagttcagttctaagagacctccttctgggcttaccccactcctcaggtacttctctctccttcctccttctcctccacagtcacaagtaaccaaggaacctgaaagtggatgtgtagctatttgaagaaggcaaggaaccctgagattcttctttgaatcctctagtccaagtcttagaccagtgattggtgcttaccttgaacaaaattttgtctgtgttcctaatcccttcaatactctgggtacaatgctcccaatcaccctgcacatttgattctaaatggcttttattttttaaaaatccatatccctaggacaagagaacaggatgcctatatccccaaaatgagctccaggacactgatgggaatgatcccaaagatcaccccacctcagaaacgtctgtgccaagagacttccccagatagaaacactgggacagtggtttgaacgacttcttttatggttgtccagtttgctatggaaataaaaggcattgattttttaaaaagatgattggaacctgtctttggccacatagggccacttggatccatttccaggccttactcatatattgccttcactgaagggctttggctttaagtcccagactggtctcccaagtgaaccataagtgttttggagctcatctggggtgaggcatgagaatgttgccccatctatcccttcaggaaaaggtgccttccctccctttctcctaaagcctggtccccagaaattgtttttgtctccaaaagtctagtatggtctttatacacccagactcttagtgttgcgtcctgccttgtttccttgttaaggatctatgcagacctcccgctttggcttagctagcgtgacattggctatcatttgacaagactaacttttttttttttttttttttgactgagtctccctctgtcacctaggctggagtgcagtggcacaatcttggctcgctgcaaccttcacccttcacctcccaggtcgaagcgattctcctgcctcagtctcccgagtagctgggattacaggcgtgcgccaccaaatctggctatttttttattattattatttttagtagagatggggtttcaccatgttggccagactggtcttgaactcttggcctcaaattatctgcccacctcggcctcccaaagtgctgggattacaggcatgagccaccatgcccagctgacaagactaattttttatcccttggtttattggcttcaacatcttctggaatcagaggtgattttttcttaccttggatgcctgagactaggggagtatagaattccaattggtaattaaggcatctttctgctcctgatcagaagggcaggttagttgggagaggtcagatggcacaacagaagtcaccttgtaagtaaggcaaagacttgaaggcattagcgtttctcattactaggtcaataacctgagggaatcaatggctttttgccgctctacctcttgtgtatctctttgacttttctttctctgtctagtttcctctgttctcagtttatattctatgttatcagtctctctttccacagtacaaacatccatcctttctcctgtgcaattctgtctctccctcttattatctttatttgtactttttccttcctccctgtctaggcattgggcatgtgcctcttcttagcctgtgattttgccttgggactgatgataaattatttccagattcaatcagccctggtcctaccccagtccaatcagaagtatgttggtgggaatcaacctgatcctggccctttcttcttctccattttcattcgtaatccccctcagcagatctttacaagcagtttccttatagctcatgtatctttaggtctttgccttccaagcactgtacagaatactttgtggttcctttttagtctgacattttgtggagcagtgaagcgtgctcagagacataatcagctgaagagaaaaaatccacccatggatttatatcagctaaatactaataattgattttgtttgatgtgcccataatttttaaagctgcaatataatataatgagggaccacaggtaatttctcctgtcatttgttttggctggatgggggtgggggagtaattgcttaaagttttaccattacacattaaactctctataataatcttgtttggggcttgctaactgttgagctgttttaactaaactggtaggcaatcggagttgatttaaatgaaaagataatttaacaaatctatactataaaaagagacatttgcttaattgacatgtattttttccttctgagtcacctaaacatttactcttgacaccaactgttcatgatactgaatagacagtccatataagagaaattagtggacctaaagaagccagattgtaggtgttaatttattaaacagagtgcaaagcccttggaaatgtcactgcttggcaataccatatggaatgccaaaatttacaatgacttttctttataagttatccaaaagggatttgaacaagtaagaggttatgccaaaatgtctccaatgtatggtcctgtaatatattgcagcttgaagccaatgatcccttatgacttgtatacaactaatgcatgttttattgaattttgcatttcccacgtgtggtaagttctttaaaatgtttttgatcacctttttgtgccattaaacttgtacagaaaatgtttttatggccattttcaaagggagaaagtttaaaatggaaacagcccaccctttctgccctatagctgtagttagaattgagtacctgtagcaaaacagctgtaattggtggttgtagtgttagaggtgttagcttgctagtgactagctttggagagtaaatgcatggtattgtacatcacatttcttaactcgttttaacctctgaaaagaatatattcttctttgtagtccttcttcccacccccttgccctctccctctccctgctcccagttgtcttacagttgtaaatatctgatttgaggcccaataactcttgccaagtaaagtcagcaaacaacaaacaaaccaaaatgtggggaaaaggcatttctcaaccatctctcagcagttattgatcatttcttaaggaacagcattgtgatcaaagactcaactttacgtaaaaatcagtggtaaattggggttgtatttggccatttgattacatttcaggattgaatagttttcagaatcacatgtaatccaaagacagtaggtagtgatgtcccttatccctgcagctgttttaagatagagacctcagaagactctgcttgaccgatgaccaataattatttgaaaaaaaaagaaaaaatgagagaaataaaacagatatttaagaactttagccacctatttagaatagttatagccagaaaaaaaaacaagggcatgagttcaaatgcattactatcagtgtcctaggcaatacctaacctactctgaaattgtgattcaaaagcagtatttcaagaggcattctccttttttggtttgctgaccccacttggactggtaggtttggtgaggcccccataaaccagctggagcagacccttttcatctcctgtgcctgtaacacccctcttcccccaccccctccgcaattcaatgagggctttcttgggtcagaggacttcaaggttgtctagagaagtttgccatgtgtgtaaggtgctgtgaactgtgagtgctgaagattcgcagcattcaataccaggcagccaaagagctgctcttgcaattattttggctctcaagctctgttcttcatcgcattctcatttctgtgtacatttgcaagatgtgtgtaatgtcattttccaaaaataaaatttgatttcaat

SEQ ID NO: 17371 - DNA, 1999 bp, Homo sapiens
gtcaagccctaatcatctgttctggaactcaacagaaatctgtaatttccttgctctcagaggtgacacagaatatgattccctcactgcccctgccccccagaaaggagagtgaaactcttatttgcaccatcttttatagccacattctccatttttgttcttgttttattattactttcattattatttgcctttttaatacctatacacactaagtccatcttacaaccgactgaaggggtgttgcacctaatcatcagaggtgcagttgggtgcttaacctttttgctttgcttttctcacccatgcttccttgaagccccaggtgccactttgctggtcttgttgccgcacagattcctgaccatcctcagaatctcatgccattttcccgcagagctgagggatgtggtcagcagtccccaccagctatcagataaggcaaactaccctgcccatctttgttgccattcagtgctacgcgctgcccatgctgggtcaatgaacagcatcaaagggaggctgaagagatttcaaagaattgtcagcttgtggtttctgggtataagtggcttgtttcgttcttaaatactacaacttcttattgtgggggctattgagttttcttgtttcttaaagatgtgttagtttcctaatgtgtgccaatgaaatatttaccccatagtatatgtcatatctaataagttaggcgaattatttttctgtttgtgtgtttcagttaacttactacatttgaaaatttgatagtatcaaaattagtatttagaatttgtgctattttttaaaaacatctactacactctaaccaatagtcactacatctcatacattggcaagataaatagttgtcatatttgttgggtcctattctactgttgatagttttaattatcattgctatcaaataatttctaagataaaagcctgaatttgaaatatttttatcagaaaaatggcatattgctgaagtgtcaaaatatgagaaaagagcatcttcattttaattaactgctttataaaaatggcaactttaggtatagataacctaattcaggttgcagttttaatattcattgggggcagtggaattgcatgtgtaaattatgttagatatatatcataacaaccctagtggattcatggaattataaacgtgatccaaattctactgtcttccaagaaagctacatttatacatccaaacaaattcttttccacagcttaagagtacctcatcagaatacagtggttcaagttaaaaaataaagtccataatgcatatggtcatcattctagacctgataaccactgagaacctgctgagcaaggacggcttttaccaacattagcacaaaggtttcctcagtttagactctaacatatgacctgaaacaactctaggtctgagtcctagagattacataaatagtgtgtagcccagaaaagtaaaataggtgtcacgctgttttttttaatgtcaacaccaataggaatccatttagattaatgtatgtaatttctgataaaagtaagagaaatgaggaactttcgaactgcaaatatgcctccaaactagcttttgataagtgtggtttctgttatttgaatggattcccatctttgtctctagcctggagaagagcaaaatggagggggaggggccagaaataggaggaggttttgaagaataaagcctcatatccaggaaaaagtgatcaagtgaaaaagctgcatcaagacccatttggcaagaggttgtccgaaaataattccttgatcatatctgaagtggttatttactcaaatcaatttctcccctgcttcgctaagactgtcataaaatggccttgacatttaatcacaggttactttccagaaaggtttctaaagttacagattcagcttttcaaattgtcaaattcactttgaataataatagaacctgggctacattcctaactcatattaacagcac

SEQ ID NO: 17372 - DNA, 768 bp, Homo sapiens
gctttgaaagaagattggagagggtgggaaaggggaggagggagccctgaaaagaggtactaaggattaggccatttgtcatctgactgtcattagcatagcctagtgtttgcatgctttttaaactaattgtcgttcattttcacttatctttaagccagtaggtcactggctgtttataaaattcatcagaggaaacattctcagacatttacccaactggcaagtcgtgctaacccgaagacccaaagtacccctttatgcaaaataggatccaaagctaaggctgggtaagaatagttgtgcagggagggagcacgagatgggcagagctggttcctaccactccattcacacagttcatcagttcattcccaagtatttattgtcacccccaaacatctctggagtactactgctcaatttttgtgtcgttatcaggagtataccttggctcttcctttttttctcctgcttccccccgcaccttgtggggaagcttcaggggagcgggggagggtgattcccagtggtggggaaaacattaatcaaggatacttgcatttagcctggagccccttcctcattatgctttagaatattcataggagttccatttgtattctggctgggtgatgagcaaaaaaaatatatagtagcaaatattctctcatcctttagagataaagaaatggtgttcatcaaatgtactgagaatagactagcatttgtggggcactcaataaatttaaattcatggtgacagtg

SEQ ID NO: 17373 - DNA, 3689 bp, Homo sapiens
acggccaaatcaagagctgcagattatcagcaaaaatgcttttaatcattttcccccttttattggttcttgttttgagggtgaggacaagggttgtggggaggggatgttttttaacaggactttttattggaacaatgtactacttgagtaataccatgtgaacaccagtctattttggtatgcttagggagtacctctaaagacagattaatcagaatgtgctctaaagcttattgtttgaatttatacgaatactgggactgttaacaggtggctatacatcgacgttttcaatgtgcttaaatttgtttaaattttccatattctagatcattttttattgaagagcacagtatgtgtggaagacagtgtataacacgtagtttggaagtgggaagctagagagaattgagtgtgtgctgttttgtatagttactatcctgtgcagcagctggagaaagcactcacctcaggcttacaaaagggaatagtttcaggagctatgtaagctggaaaaaaggtagggagttttggggtgcagaagggtactggagctaattttttcttccagtttcccagctaccctgccccagggaattgtgtttgtcttcatttcagtggtgctttggaaatggattcttttggttccctcctggaggttcatacattcatatatatgctctggagtaatttatgcatttggataattaatatattgctttcagatgctgggagagtacattaactgagtgatgcgcaacttcctctctcttagggaattagaccatcagaggccttgatggagagttgcatggggtgctatatgcagacttccatggtttgtgtgtagccatgaacacagcttgcttgcatttagtaagaccaatcagcttagtgtttatttcttctacagcacagattcactggctgggtctccagtctcaaattgccaatcatttgcaaagtgaggaaggatctttgttgacaggttgaatgctttgaatttctggtgactactttgaaataacttgttttgtttgtcaaattctaagcatatgtcttaaaaggcatttttgactatcacctccaagggaatagcttgagaaacccaaagtactatgctgcagtcgggggagaggtggattgcagcagtatcctcaactacctcttctcactgtcagtgacaccatcttggaatacctttgggaagcagcaggaaatgtgcatgtgggtagagatcaaaggaggcaatggctccaagccttgccatagggctgcctccaaggacacagaaggatgccagttgccacaggtccctgccctgtgtcacctgtctgcccttcattaaggtgagaaatctgcagatagcatcattaagatcagttttaaggggtatagggagggtgagggaagtggggggtgttaggtaagggttgggggtagaggttttgggatgtcttagttagaaaccagattaatagaagagtaggcctgatatattacatcatgagccatagtggtgggaaagaactttagcaatatagccctacctcctcattttagtgatgaggaatctgagaactggagaggttcagtgactttttgaaagtcatacaacacagctaaccattatgccaatcaccatgcttattttgggaaactctttatcttttttaaattccattttatgaaaaggcatcttcatggtccagggaatatgtatcttgtaaaatgtacctggttggagtagcttgtccagtcttgacaaactactgaatttctgtcttgcctctccttcagtgccttttaaaaggttttcccttttctgatctgcatttcaacatagagtcacataaatgtccccctgagaaaccaatcccacttctttctaggagattgggtatcttagataatcttttggggttcctctgtgagtataggaatggtatccttcctaattatcttccaaaggaattattttgtgtgtgtgcctgtgtgtgtgtagagacataaaggagggtgatgtgattttcagctagtcctttcacattttcaataatgaggtaatcatgttacatacacattagtcctcagttataaagtgaatctcagatagaaattaaaagtgcagttgtgttaagactctttcatactaccctttagtcataaggagaaaaaaacactcaaatagtagaagcagcaagtagcaaacttcaggagagctactttctatccaaataatttaaaaaacacttttcacctactcctttcatggttataacacattggcagactttttgctggctctgggagccatgattttaatcacattctgcaaggtgacaaatgtcatacattccacattgtgtggtagccatctctttagactcatgtgttttggggaaaggaagaagttcttggctgagtactattttgaactttccagaaccctctcacaccagagacagttcttctctgttcagtttccaatccccgataatttgctaaaataacattgtacatccaagagagggaagaagagtatgtcagtatattatgcagaagatagatacagccttttcagaagatctccactagtttttgttccaaaaattcaagtttatgggagaaatctcaattagccaccttttcacagttgtgtggatataacatttgggggatctttctggactcctacctatctgtgcattttaccggcacctcaggaaaggagggtgaccaggttgtcttagcttgtactgcttggtgatctctgaggaccttctaattcagttgtaccccagtgttccatgtatagaaaaacttcattagaacaaactttacttgatatgaaactcctattaacagtctttttttgaaataaaaagtagcttgagctttcttttaaaatcatgtatcttgattgttgatttaatgaaggatttccttttaatgctgcttttgagcttcaaggtaataggacagcaggaacctaaaatatctgccatcatctgccataggaaagatacccagagacccatcatgttctctttttgttgttacactgttgggtgggtataacaattggaaaatgaacaaactgattgattgtgcaaactactttttatgacaagcctaaaccctcataatgcggcagcttaaagtgtatacatatgcactaactttgatcaattatattctcatatctgttagctacacagtctcctattatctcaattgcttatgtgcatatggaatatgttacttaaaacgtgtgcattcttactgaaaatgttttcaaaggaaggtatcagctgtgggctaattgccaccaatttcagcctgccacgattcttggaaatatgtcttccaagtgccatccatcatcagtaggacaagtgtcgggagtttgtttatttttttccagtagcaacgatgggttacatggagccatgaaacctccttctggcctcccttgtgattaatggcatgtgtttgtaaaatggatagctggggttggcagatggctagagaagaatcgcctttggtttaaaatgtatgtggtcccctaatgattgtgaccccattctgtaatcaactgagctagttccaataaagttaagcaggtttaaatccactttgtgcctatcttttcactgacaataaagttagctattttaaaatgc

SEQ ID NO: 17374 - DNA, 103 bp, Homo sapiens
agactttccatatcaagagacatggtattgactcaacagtttccagtcatggccaaatgttcaatatgagtctcaataaactgaatttttcttgcgaatgttg

SEQ ID NO: 17375 - DNA, 2596 bp, Homo sapiens
tataacattttaaaattctaagtgtatagtttcatttatttgaagtgatttcaaatatttcaaattcatgaataagaatattccgtcaaaaatagtttgccttaggtcacgccttaggattttaaaaaaattacattgaaacatcaaacttaaacattgaattgcccgaacttctttgggggaaaactggattaacttaataagagtatttgataaactcaaattctctttttactaagtcagttgataatcttgattatttttcagaaagcagactgatactaaatttaaaatgtagtttcaatttaataatcacattaggtttaatttttttacatcatagcatattagtaaacatctggataaaggtaattttttttagcaatttagagcaattctatatttgagttatttaatacacttctaattctagtttatacacaatttcttcaatctttggtcttagttttctagaaaaaaggagtagaaaaaacaattctggctttatattaaattcttttagtattataggttggtgccaaaatattttcagttgtactgtagattgtttacatgtgaagtgcctgtgtaattgatgactcttacatagtcttaagcatttttgcaattttttaaatgtattaatagagtcaatggaactttaaaatattttagtagattttgtaaagtcagtaatatgtgaggatttaaatgagcctcacattgtgacatttgtggttttttagttagtccattgcagtttcccttaaattggttatttcatgttgtcaaaaataccaatgttaatatgattaatttatgctatttaattttgtgaaacttaatcatcttttaaaatgtattatttgaagagtattttatttctgtattgaaaatgttacacaaagcagtaaagtttttgagaactagtgaagtactaattatcaaggacattttgataaaactgccaaagtttgggtttatatcttccctttgagcagcattctatcagtgctgcctttagctatactcagagagcagcagttgaggaataggtttttactcaaaatctggccatttgtgaatcctgtaaaccttgtgatcttcaattactttgatgttaaattaaacacagactcttctataaatattttcatgagatactgtgttacacaaagtccttgttttaacttaggtatgggtaaatttacattggtggtattgcaggaatttttcaaaaacattactgtaatgaataactgagtttcctatagaagaacctgaataattacttttgtagtaaccaagcaagcatcatatcttaagtatgtgatcatttgcacttgttacctcttaatatggatgcaacttattaaaaatgttggcctgggtatttcaaagggtatatataaaaggtaaaaaactagtgtgccaaatggtataggaacaactgtactttttttgatcagttggcatgaagccatagaattaaattttggctttagaatacagatgtgttcattacattccccaagggtcaaattggagcttttaaagaattaaagcttctatgagtatatggtttaagaattaaattattagtaatttattattttaaatatttgacctcattagttgttaattttttagttggataaaaaaaaaactcgctgacataatctccctagtgaaaacttgggtaatatatgtaagaaatggcaaataaataccttagttaatgactttttatgtagaaatttgacagcattacaaattaagtgaccattaaaaacacagcaatcattcatactgctttcataggtgttatgatagtctctgattaatcaatctagtatgaattattttacaagtgttgtcctgtttcatatctttgaagtagtagtgaaattgtaggccattttcttataacatttcagttacttttcagttaattattcctttaaaaagaaaatacagcagaacctcactgtagcattctttactgcagagcaaaattcaatttaagatgggcttctctgaggtccacatcatggcagttcatttactcttgtgccaaatggcaacaccacgtctaaagcagtttcacagcatggtcccctacaatgttataccaaggctctgatgtatttcttttagtagtttctaagtgtaaaatttattctaaatgtttttatggctattatctatttcatcagttattgaattaagaatgattttcattacttgagtgggatttgtgatttaatgacagttgaataatcaaaaatattttattaggcccccaaaatttaatagatatctatttctgttacattttattactgtatggcacaagaaagaagtgacattgggtatgttagaaatgaaataaggagtaaaaatgcattaccatttgtttaataattatctttacagaatgctagtttaatgacttttttaactgaattttttgaataaatcagaaatgtttgtattggtcacagatctatcataattgcttttctgatgcatttaaaaataaatggaacacttaaatgtatattaccgatgcaaactgtggataaagttgaaagaa

SEQ ID NO: 17376 - DNA, 56 bp, Homo sapiens
aagcgtacaggatgtaatgccagtggtggaaatcattaaagacactttgagtagat

SEQ ID NO: 17377 - DNA, 1094 bp, Homo sapiens
gatcatctctacaactaagatgctgtagttctatctttgcaatgtgtcataaattctcttctttttcccccttaagtagtatatatgttaggattaccctctggtaattgatacagatattggaaaaaagacaacattgatgttatttgtgctctttgtttggcctagaatgtttataaagtggtaacacaaccattctggaaatgtatcccatagaagctgatgtttaacatatgaaaaaaaaagtattgtctataaaatgtttcttcagtactttttaaatgctgtgtattgggtgtaaggtatttgtcatcttacattagtaaacccaataagccaagttgaaggtggattatagtaaatgtacaactgtgctcactaggcttcaagtaaaaagttttcctttcatctttgactgtaagatgtcaaagggaggcagcctgcttgaacaggaaacaatacacaaaaggttgccaactcgcatgagctacctccctcttttcataaagtatttttgacatatctgtcaacccacttgactgtgtgggtgcattgagaacacaaagtttcctagacacacaggagaagtagcttaaattcactaatattaatttaaaaagcagcatgaaccctctacttataaacaagggtttggtgtttttaaagtgtgtatacatacatacacatacacacatgcacatatgtcaaatataatttttttaaaaattgagtggcacatcaaagaaatgtgaaattaaaaagaattcttccaaaaagcagcttccattaaaatgggaattcagtatgcacatactgaatgcatatatgtagaaccatacagaatttaggtggataagggctagaaattttgagcaacaaaatttgtcacttgaccagattttatcttcaaaaactgtattctactccttctcctttgctgttgaggtaacttgcatattatatgtattctgtatactcagttcataaggttatttagcacaaagtatagcagcttcacctggagagctgcttttgctcagtaaattcaacttccatgttttatctttttttgttcaataaaaacatttaatgtc

SEQ ID NO: 17378 - DNA, 189 bp, Homo sapiens
ccaggcctttttctaagccctagactagaggcaagcatttagatcaggaggcaaagtaatttcttgattacatagacggattcctatttatgccctagcagaaggctttacgttgtttcccattgattctcctacattcagtgaggtctttaactgagtccatttaacttgctttcttttttttttttt

SEQ ID NO: 17379 - DNA, 1008 bp, Homo sapiens
gatcttactaatttattttgtaaatgcctaatgaggcagatttttgaattaaagaaatgctacatgttccggttgcagagtatattcataagatgtctcaccttgttcatttcacatagtggtttattagatattggaacctaaagaattctgtccacttgtattagcttaatccagcagatgatattgtgcagttactgtttgtgtctttgatattgctgtgtccctcagattttagtagtttgacaagcaagaacacatatccaaatggaattttaccctgagaaattatcattttaaagggcatagcacagcaatctgcaacaatatgtaaagttgatattgactacaataaaaatccagtcttaattccagatttactgaaaatgtcagatcattttgtattaatctattttcatctttgtgtgaagccagttatagaatgtttgacaataaattgtgctgtacacgtaaatgtccttaccaactaaatgatgtaaaactttcttaaagtaattttagtgttcatttatttataacttctaccatgtgatttccagactattggaagtgatttactgtatcttgtgatatatgggttttaacaaattctagtcttcacgctgagagagcactacttgagagagcagttgaaagtttcaaaaactttggttcaatctgaagaaaggaagcttgaactgtttgttcttggtgccttgcagagagactcacagcaactctccattatagctttcacacggtttggatgtgcagcacatccaaggcaaccacagctgtggtagagcttggtaaaagactgaagatacattggtgctttgatgaaaaggtcagttggctggtccctctctcaaaaagcttattaagcctgaaaagccaactttgtaacatatttaaaactgctattttcgcttatttctggaatgtaaaaaaaaaaaatgtataaaaagaattagtgtatgcttcctgaataaaaaggagccaaagttg

SEQ ID NO: 17380 - DNA, 3106 bp, Homo sapiens
tttgggcttcctgtagacacccttttcctgcgcaacagagctgggcctccctttctctaatttcccccttaacatgcctggggggcatacaatccaacccgcgccctctcctctcttcctgccaaggtttatagaaacctgagaatctgagggtgatgtctggccgctggtcaagaagccaacagtcatgtggctcgcagatgcatcctgcatcccagtccccctcccagcacccccagccatcccccctgtcttcccccacatctttgccagaggtgtgacatggtcagggggcccatctgctactctttcccaccagctcccctgttccagttctggttgctgttagtttccctgaggtatttgcaaccaccatggctgggtaaccaccgatcagcacagctgtccccttggtctcctgtatcccagtcactagtcctccctggtccaccccaccctcatcctcaggagccacagccatttcttagagggtttcaaaaggacagcctttggcgccttttccttctaacctttgagtccagccctttccagttttcattcactcgaagtaactgcactcaagctgtgctcaaaatcggcaacgcatttatttacaccaagcccttcccataaaacacaactgctgaagaaaatagcagacgtttcccctctctctaactctgggtatcccacagatgcaaaagggagaataaacctgaatattattaccagcctagagtcttgaatgatagccttaccgaattcttcttgtgaggtatttcagcatctcggggggtaatttccggaagggctccatactgtcccaataaggtgaggccagtagcaggaataataaatcccactttgtaggctggaaaactgagctgtcaaaagaatcaagtgtttgggggtttgctctgatgagtcttctagttcatttggtgaatgtcatgatgatttttaacatgcattttgcatgcatcccccaataagaagagatgagactcggccggagagaagaaaaggcccttaactttctttccaatttaaggagttgagagtttaaaaatattccagccctaagtttttatcatgggtcccatctgatagtggctttgggaacctctgtgaagtagagagccctcccttgtcagggttatgaggcacagtggcctttggtgtttggccagtgacagtgtgagagatggagttgacctggcaatgatctgtggctaacatgccgtctctctgcccttcctttgcagtaatccatggctgtgtactgaatagtattccccgctacagctggactggactccatttagccttttaagccgaggttcctattttaactgacagctttcctttggggtgccaggcagcgaggccccccacccctatcctgccatgtacttcaagctcacttcttctttttgagttccgcaacttgctcctgcctcccagccccactggcactgaccatgaccacctacttctattttttttttagagtttctttttttgatcacttactttcaaagcacacagtcaaacaaggttatgccaaatttccaggcctttttgaagtattgagaaggggaaggggatttctcacttcaattatagatcataataggaagcaaaaagaaaaaaatgaaaagcaaacatatgcacgcacttttcttgttgacaaagcaagaatataggtttgctgtgtaggtttggtgctctattgattggtgagtgaccagagcaagtatgaaggtgatgctgccaaagcacaagccagtttcttgggaaaattcaagttacagtggagtatttttttgaagaccatatgcttggaggtagaaacaaaccaacgaccaaaaaaaaaaaaaaaaaaatctgctcagatactcagccagtagctcagagagatgctgagttaggcctgtcaggtctccttgggaaaggcttcatatttgcaactttgatgattctatgtccagcttcagagctgctttcccagaaattcacgcttaaacaaccaaccggtaaccaccacttccccacaccgccgcccggtaattatttgcattacaaaccggaggcgccctcatttgcatttgtgtacagattaactagttaaggcttgagaagctctgaataattcaaaagtattagacccacacagccttggagagaccttcagaaactaaggaggagttttatattaagggagacattttagtcagtaagacgatataacctacttactccgtaaggggaaatgaaggcccagagaagggaagggacttgaccgaggtcccacttctgtttcgaggcagaagccagactaattttcatgcctcctgactcccaatcagtttcacaaagggattcaatctgtttatatacgttacattcctggatacgaggtcttttgatgttcagagtaactgactagttagtattagaagaccctcgaggtttttttccacagaaaaacatctgaagatggattgggtgagggctggcaaaacgaaggcatgccgggccagctccttaacccaatgacccagtgatgctgcaaggctggaacggggtccaggagactgtgtgtaacaggtgccctaggtgacccttataatcagggaagtttggtgaacaaaaatcgaacccatgagtgaacataaattaaaaagttgatcaacctattaaaatgtgtatttcattgggtagcttttctcactgtagacagattttttccttcttcaatgaaaaggcttttaaattagtacaactgttactatttaaaaaaaaaataccctaagtactctgtttacttctggtgaaacaaaaccagtcattagaaatggtctgtgcttttattttcccagactggagtggcttttctgaaacacacacacacacacacacacacacacacacacacacacacacacacacgtacacacatccctcacttctcttaagccaagaagtttgctttccctagctgcagtgtagatggctcttgtttttgtttttttgttttaatcatttggcattcacatgtggctgttaatatgtgcttgtttttaattaaaacaagaagctttaa

SEQ ID NO: 17381 - DNA, 1018 bp, Homo sapiens
ctttttttaatcttgtcttcagcagctgcactaagtctaaaggagaagactgccattatagaagagttagggttccatattgtctcaaatcagaaatcaaccaatttcctctcccctcaaactgcaagcacacacacatacaccacaccactcaacaagtgttcatgtgtccctgtgtccaggcaagaagctctcttcctgactcacatggtattttaaatggaagtgtcttgtcctaactaacaaggcaggaaaagaaccatcagagctggaaaatggacgaaatgtaacctcagagaaacaactacaggaccactcacccaagtgtaagtgactggggcaggacacctcagctgtgggtatgaaagtactgttctgttcacaaggttttgtttgagttttatgtttttcttttaaacatttctctggttcgatgggttgactgtctacagccactgttaaacatttctgaatatgcaagagaaagtcaagtgacatttgtatcttcttcagcattcgcagaccttctatagattccagcaaagggggaaaatgtatccactatctaacacttaggtagagaagggagggggtttaagcttagtgagggcaaaattactccattccaccttccgagaccagttagggttttgagagaggtttctgctcaacctgggatctggagggagagctttgatgttggtaaatctgccttgaattcattggtttaacttgcatcaaaataccatgtgagtgtgctcattctcatatatcccctaccaccatcaccaccattctgctgttcagtgtctcttgagagagcctctttgcatgttttccagaatctgtgtgtgtttttcctttcttctcctttgttctttttgctcaaaggtgtgaccagtcattgcccctctggggctttcattctccaggagaaacatcccagaaccagcactgtttagcctgatacctttctaatgtccatgtcaattttcaataaaattcaaagaaatgctaa

SEQ ID NO: 17382 - DNA, 178 bp, Homo sapiens
ggaattgcacatgagatggcacacatatttatgctgtctgaaggtcacgatcatgttaccatatcaagctgaaaatgtcaccactatctggagatttcgacgtgttttcctctctgaatctgttatgaacacgttggttggctggattcagtaataaatatgtaaggcctttcttttt

SEQ ID NO: 17383 - DNA, 852 bp, Homo sapiens
taagtccagatggccttaggtgtcctgactgtctaggcagccaaagagcacacgttaagcaatccagaggtgccttcagggcaaagaatagagagaaagggagccgctgtgctggtggggtacactgcagaggagtaagtcttgtgtcaaagcaggaatctgatcagaggttcagaattggaagtacaatttcattgcttttgcaatttctacaaattaattttaaagtgtcagaaaaaggtgacggcaaggacatgcattgcaatttgcagggggaattgtcaagtgaggacttcatcacatatgacacgagagaaaagtaagagctggttctaaaatcaaaagctgttgttcatcctgaattgaattttctgaatttgggtggagcagagtcgctttgaagccttgttccgatctaattctattgtattgttgatgataagtgttgacattgggtagtgtagaagcaacaagcatgtccttgtagtacaggtacagtgaaggatagaacacactttcgttgatacaaaaatttaaatagttatgttacttctgtatccagtgtcctaaagttttaggattagttttagttttttgtttgcttatatgagcttagcgtaaagaatatttttaaacttcgtgttttgtcatcagcatcttttctattaagaggtaaaatgtagtccttgtttgactcttgacaatccagtgtgtttgatcttaggtctcatgatctgagtgcataccctctccaggaaggaaactgcaccagtgtctattcctgttaaatagcaacttttagtctcagcttgtttcgttttgatgtcaataaatagtaacagcattcaagtg

SEQ ID NO: 17384 - DNA, 107 bp, Homo sapiens
gtttcccataattcttaaatttaaaaaataaacgttttgttcttttggaagtcttacttcgtgtccttcctttgtagagaaagtgacagagcaggcgggtggtgaag

SEQ ID NO: 17385 - DNA, 159 bp, Homo sapiens
agattttctgattgtccagaagacatttttaacaacaaaaaagaaagtctgggttccacacatacatagaaaaagattattatgttctgagaaagctttacagtgctactgtgccttctatttaattctttcagtccttcaataaaaagctgcttattg

SEQ ID NO: 17386 - DNA, 125 bp, Homo sapiens
ccctagaatgccatccttcttcaggagctagtttggagatgggtttttctggtgccactgacacctgggctgcccatgccgctcaggctacccttatctcctctgcacttatgttatcaataaag

SEQ ID NO: 17387 - DNA, 2219 bp, Homo sapiens
agaggaatgcctgctggctattgagattattgtggcttttgtatttctgcttcagtggaagtgtgtagggtacaaaatttaaagtgtgactcttatgcataaagttttacaatggcctgccaggctagggaaagatagggacgaagcttattcattattagtgcagagcaggggtggtcaggctgaacgcagcacagaagggcagctcacattctctaagcaagactggggagccagcccagcaagaagcttgtttggacttgcattaccctatgctccacctctgtattcagcagaagtgtggttgccatctttttcactttatgtaaaggagtgttgccctcgggcccttggcagattgccaccccagcacctaggttgaagcacctggtttataggccctatctttccctacccctaaagtcagtccctaaggacaatttcccagctgatggggctacacagtagttccaatacagagagttctggctaagattttgtttgcttgtgtctggatgttgaaaaagactgcccgtatctcttactccttccttctctgtgagtattgtaaaaatggctgttgtgatcactcagctcagcttttgttattggtacctcctaaagggaaaagtgcaatattcttgcatcttcagtagtggggaacaggatgtattgttccggaaacactgaaatacacagcaacatgtgagatgttttaagtagatcacttaggagacagtggttctactacatgttgcattattacaaaatacatttgctacaggagatataaatcttatggttgtaattcagagtttaaaaatgttataaattaggttcttgggtcgtgatatgaattgttactaatctttgtgactatttaatcttcaaatattgtgcttaaccccagcaatccgcacgtatcctgcaccccaccccaaaagagtcatctgtattttaatgccactggtcttatcggtccttttgtctgttgagaccagtcatgacagcattcaagattatgaaagtgttacaatgccgcttcaagtctgcaaaacctcaaacgtagccaacttgacaaatatttaagtgttacggcagatttaaaatccatctggcacaccgtggtaggtatttgtacagttcttttaattacacatagctttaaaccatcaacctgatgagtttaaagcttttgcacccatgccttcacttcagaatgaacaccttcattgtgatcttatgttaacctgagaattgatttaaaggaagattgataatcctatactttataacgtaaaaatacaggggctacaggagggtacctaattagacagttctccaaacacagaacacacactggaaaattttccggccaattttgctacctcccaacttgatggattagaggtagcgcaaatgctggtgctcccatctaccttgtagacacttagccatcaagaatcaaggcacaagaagtgcactctctcattaacagtaaatgtttgcaagatattcagtttaactttcagcatcatgaatgttcttatccagattttgaatccgaaaaactataatccttttatgttatacaaaattactatgattttttacagttctgagcatattaaaattctactggatttcaaaaagagactaatacccaactgactaactaaacaaatatcaacttgtaatactcaatgaatttttttgccatttacatttgaccgttggctttagtgaatgtccatatttaattttttaaggcaccattacacagtttatcctacatttatcacatttcttaaagtgttaagattctatggctcatttctatgtatttttcttactttacaaaataacctgaaacagtatagattttgtaacacttaatttgagcagcttttttattacattgaattatacaaagtgcatgttaccttagaaaaattaatatttgctgctttactcttttgcaaaacatttgctgtaatgaatggatttgtatttccaatatgtatcttgactgcattttgtaatatttactgctttattcctaattctgctttaaagtactgaactgggcatgaaacattaaaatattaatccagaaactgtataaactggatgttgcttaaaatctgtatcactgccatgttgaaaactcagactgcttttgtgatgtttcaaatgaataaaactatcctcccctcgtt

SEQ ID NO: 17388 - DNA, 2644 bp, Homo sapiens
cactaatcaatacgtgatctctgttacaaaagaaaaaagcaagtacaagttccaacatgcaatactggtcaacttaaggtatatttagttgcagtccagctctttagaatgggtggtatgggggatttcaaacttaaacaaaaaactatcaactacaaattagttgcctgactttggtttttccaaccaaggaatttaaaactgttatttttacagcaaaagatgtgcaaaatcactggattataagttctattttactgtcttgaattagtatttcagtgttttcattttagacattcagactaaaaatacaccgtttagaaaaaacaatttttgaaaaagagattttttttccctgcaggtagttgagttggaacaacatgttctaccgtggatttgtacttgctccttttgctctttttgtgtgtgtgtgtgtgtgtgtgtgtgtgtgtgtgtgtgtgatttttgtttgcaggttaacttagctactttggcattgctgcatatttgacctttgagagatataatagtagatttgaacaggggctggtattattatgttcttagcaataaatgcttttctaatgccttttgaatacatttgtatttatgtggctgtaatgacaaaagatacaaaagctttttaaaatttagagtaggtattaatcttattgtttaatcttttttttaaaaaaactggatatttcaatcttttaaattgcaatatataagactattccaactgggcatttcaatccattttttaggtgctttagagataattgcttgccagtgccaattgagggcattagtactttgtgctcataaattggcctctgtatgcagtactaaaattaatgcagatttctctttagccttccaacatttcttgttgatagtgatgtattttattattttctttttcttaagaaatgccagtgtgtcctagaacctagataacgaagtgcacttacacttataaaataacttgcatctaggctgggcgtggcggctcacgcctgtaatcccagcactttgggaggccgaagtgggtggatcacttgaggccaggagtttgagaccagcctggccaacatggtgaaaccccatctctatcagaaatacaaaaaattagctgggcgtggtggtgggcgcctgtaatcccagttactcgggaggctgaggcaggagaatcacttgaacccgggaggcagaggttgcggtgagccaagagcgcaccattgcactccagcctgggcgacaaaaacgaaactccatctcaaaacaaaacaaaacaaaacaaacaaacaaacaaaacttgcatctaaccaaaaagtcttggttttatcttaatccattaaaaagttgttctttgtttccagcttgcattgattgctacaacatcactaatttggctttcacatttaaatggttctgtgctaatcaaaactttcgttgttattattcattatggtagaatcatttttaattcacgtgctttgtgttcagttttgtggtctgagagatgtaccaattgtcaaattaccgtgtaccacctaatgtttataggagaaagcaaaatacatcagcttggtagttaacacatcaaatatttcttgctgcttctaggagaacttttttggtgtgtgttggaatggctgagcaaatattaaaattgttaatatgcagccatatatggaaggttcctgtggggttgttttttcgtgttttttttttttttgtggtgggattatgtgcctcccattcactagaaaatgagaaaattgtctgggttccaaaatattgacattgaatggatcaatacacacacacagacatatatatatatatgcacacatatataggcagttgcatgctagcatgggtatttttataacaatataactgagttatattggaattataaatattttccgtcacttaaatttgttctttgtttagcctgaaaacctttatggctcaagatcagattcctgactaacccctctcttagagctacagcgagctgcattaccagcttaaaacacttcttagggattaaatatagatgtaatttttcaaaatcgtttttaatttaaactgtgttttagtgtaaaattgttaaccttgtaagatggataatgtgtataagaatgtaggccttaactatttcacatgagtcaaaacaaagcagctttaaaaaaataattggaagcacaagtgcatggcactgactgaatgctgttaatatttctaaaagtttctacattcagattatatgcctgattcatagtaaaatacctctaataaacactgttttatagaaaacctgacttcagtgaatatttttgtattttacatgggccagtttatatactgctatttacactattatttcctatagctacatgttctttgtaccttttgtagttttatttgtattactagattcataccttgatggtaacgctctatctggttttgggtgtttttcatgttttagcatttgtataaagaaactggtccatgtaaatactttccatgttttttcttcaaatgtttaaaccactagttgatgtatggtatctttagatatttgcctgtctgtttgctcaaaattgcttctaaaacaataaagattctt

SEQ ID NO: 17389 - DNA, 497 bp, Homo sapiens
aatctgcaacctgattgattatataaaaatacatgcaaataacaagattttcttacctctcagttgttgaaacactttgcttcttaaaattgatatgttgaaactttaattcttttatcaatcccagcattttgagatcagtctttattaataaaacctgttctctttaatcagcttaaaatccaaagtgtcatatttactggtcctggagacaaacttgttcaaaagaacatcaacgtgcaatgttttaaggtctatcttaagaagccctggccaaattttgatcctaaccttgaagtatgccttgaacttattaacatggccattataagaataaaatatgtagttgtgtcttaatggaattaataaatgtcatttcactactggtgttctgtttcaatgtataaggactatagtgatttaaactcatcaatgtgcctttgcataaagttcattaaataaatattgatgtggtataaatgcccatcagatatgct

SEQ ID NO: 17390 - DNA, 2170 bp, Homo sapiens
aatgttggccttgcagcatttggtgtcatatgcagtagccagtggataaactaacctgttgattcaatattatttgactccttttttactaccgatgaccaaatgaagcagtgtaattaatggaaatagttgagtggactttttctcagtggttaacatgcccattttaaagagtaatacttacctttaagaagaatgttgttgaactctttgcatgttatttagtatgatgtgcagaaaacacttaagaacgtacctggtcttcatgaattcctctttggaactgggaaagagatccctgtggctattaaaaaggggggagggttcttacacaccattaattatgaagcaaaaggtttatttgcttaaaatgtcatttaaagatacttaaactgcatgcaaactttatttactgtacagagttctggatgtatttatcaaatagaaaaaccacccttgacttggttgttcacccgttttgtgatttcccttgaaaagagaaatgaattgtcatagctattgatattttactaggtgatgttctgttacactgaaagggatgttttttaaaaaaaattatttggaaacaagttttcaagtagggggacagttgcttacataatatcttgtatattcacatcctaaaaattttcatttatgagtatgggatgtgtgtatatggcttagccccaagttaactgtgctgattaacaagtacttataaaaatagctaaagtagaaaattaatgatcagttgtactagaggaacatcatagaagagaaaaatccaactctttatattaaaaatgaatacaataagaaaattgcaaaagagaccaaaatgaacgtgttttgtaaattgttacaggagcaaaaactttgcaactagttttcaacatactttagactttaaatgttgtttggacagttttgtcttcaacttggaccaattgtagattgttacaggcttcctaggatttagcattcctattttctctaccaaagttttttttagaagcatcccaactcttctctttgttgataaataagcctttcctgtcatcttcattttaacttgctaaaaccctagatacaaaggtcctccctcatttttcccacagagcccctgtttgggaatttgagattctgtgtcatgctggttttcctttcagaattgcttgaaatcgagttctcttagccactggacacctagttttcaggagaatgtcccaagattgtttatatatacaaaatggcaaaagtactgtttttcgaattgataattcaagcaaaggcttctctttactgtcactgatttttttttgtttttattttgtttccttgtttctatttccttgaagctttgaagggaggagaagcagaaaattttgtttatgtttgttaaaaatcagaactacttaatgctttttgccacagcatatttccttgcctgttggagccgttaggaagattacctatgtcctaatcttcaacctgagaagatttttgactcttgtgtctactgttgattgtttgcttgagttctcaaagacctgtggccaggtattttaaaaagtcgtctatttctttctagttgcatcaacttgcacactggtgtctaactatatgtggtattcggaacttgtaattcttattgagcagccattgcctatattttctcagctcctcactgatttctttatatgagctcagctgacaagcaaatgcagctattttgtttaccctctcttcataccggaccatcaacaacagtgttctaactcatccctgatggtctgtgagatgtagactattacacaagattcaagttactcgtaagcaacttttagatagagttggtcctgttaggaggagactcttgatgtcaccttcagtatcttgaaagcgggtcccctccccgaggctcttaattctttgaaaacttgatgctgtttcagctgaaaaattagcaagactgttaaaaaaaaaaagttgaggggagctgtttaagaaactgaaaagtaattgcaaactacattggataattgtgactttcagttgttgttctgtatcagttgaatttttgtgctcttttccctgtgtacgtggtggttctatttttctccaataaaacttttatttaaaaaaagtttctagagaagatctttaa

SEQ ID NO: 17391 - DNA, 532 bp, Homo sapiens
gaagtggtagaaaagcgtgaatatgatctttgtataggacgtgtgttgtcattatttgtagtagtaactacatatccaatacagctgtatgtttctttttcttttctaatttggtggcactggtataaccacacattaaagtcagtagtacatttttaaatgagggtggtttttttctttaaaacacatgaacattgtaaatgtgttggaaagaagtgttttaagaataataattttgcaaataaactattaataaatattatatgtgataaattctaaattatgaacattagaaatctgtggggcacatatttttgctgattggttaaaaaattttaacaggtctttagcgttctaagatatgcaaatgatatctctagttgtgaatttgtgattaaagtaaaacttttagctgtgtgttccctttacttctaatactgatttatgttctaagcctccccaagttccaatggatttgccttctcaaaatgtacaactaagcaactaaagaaaattaaagtgaaagttgaaa

SEQ ID NO: 17392 - DNA, 140 bp, Homo sapiens
atgcctgtgggaattgtaacacatatcattccaaagttcgttacatcaaaagtgatatccagtgacatctaactttcatggatgtatgtgacagtgttcaagttaaaaaataaaagtttgttttaaatgaataaactgaa

SEQ ID NO: 17393 - DNA, 140 bp, Homo sapiens; identical to SEQ ID NO: 17392

SEQ ID NO: 17394 - DNA, 140 bp, Homo sapiens; identical to SEQ ID NO: 17392

SEQ ID NO: 17395 - DNA, 140 bp, Homo sapiens; identical to SEQ ID NO: 17392

SEQ ID NO: 17396 - DNA, 140 bp, Homo sapiens; identical to SEQ ID NO: 17392

SEQ ID NO: 17397 - DNA, 140 bp, Homo sapiens; identical to SEQ ID NO: 17392

SEQ ID NO: 17398 - DNA, 140 bp, Homo sapiens; identical to SEQ ID NO: 17392

SEQ ID NO: 17399 - DNA, 140 bp, Homo sapiens; identical to SEQ ID NO: 17392

SEQ ID NO: 17400 - DNA, 140 bp, Homo sapiens; identical to SEQ ID NO: 17392

SEQ ID NO: 17401 - DNA, 778 bp, Homo sapiens
gtgagatcggactggaactgttcggctgcgaccagaaatttattttcctgagtaaattgccgagaattaagaatgaagagggccatttgcatctccttaaattattcagttacctgctttattgctccatgtggaaaacttaaaattgttaagttgtgcattactgtattttaacttgttgcttagtttctacatgtttattttcagtaatggctgaaagtgttaactgttccatacttttagcacaatgtgctgcataaggttacctgtgtacagagttttactttagattaactaaatattgcctgggttcagtttttatttccattctgaaatgcttcctttttattgtttgaaactgaaaataaacaattgttgaacccttttgattttacctcattttaaaactgttttaatttattatttggcttgttcttaatattagtcactaaaagcagtgggagcattgtcttatgaaatgcttaggaatcattttatatagtacatgtacaacattaaacgtgtttaaaaaagaaaaaggtaccagcgatcacttgtcccttgccattttttcttgtaattatgttagacaaatcttggcggcggggggatcaaaacataattgttttaattctacagctgtaggagctttgtattgctgaactttcatctggaaaagtttcacagtgacatttttaaaagagaatttttttatctgccgaattctaccagtgtaaccttttttctaaataaacaatagttttctcaaatggttgta

SEQ ID NO: 17402 - DNA, 2563 bp, Homo sapiens
caaaaatatctctgcctttgcgtcaccaaagactgcctgtttttaaaacataaaatggtttattgtattggttttctagatcagaactctgtatatgtaaatatggaggaaaaacatatccaactgcctttcaatgtgacggaagatggtattttaatattgtttgtttaaactctttaagaaatgacagagatttttagttcttgtgtggcagtattcaaaataacacaagtagaactcaaacagctaaaaacagttttcagaaagcaccactttcaatttgccgagccatgcatatgttccaatatccagaaagaacccaaggttctctatctctattgtgagaagcagtttcatccttaactgttggcagaacttacgggctatttgaataggtggtgcaatagtatctgaaacttgcctttcgaaagactgccagccctttgacgttttccagatctgttataggaaacttaaaaacaggtgtaaaatgtcttcagccaccatctcctagagtgaggacccaattgcccttccttcttgattattcctccttgcttgttaaagtaaatgccatattgttgtgctgtgttttggcgtgtggtggctgggttctgtctaccatgcttccctgtgggtgtggtaaccagactgtatagccgctatttgctcgtgtgtacatgataccaaagcagctggccagcgtgacctctctcacacgacctgttttgactcaattttttactaaaagttgttcagctgtattggtatcatgtaaacatagcttttattaacctgggtaggaatttctcatttatatataggatgtgttttggtcatagtttcacattagtgattcagtatctatacactgacccaatggttttgtgcacatgaacggtaatttacttaaaagtatgattctggtacaaaaacaaacaaaggctttagcaggcatacgtgtctgggatgccgatacatacattaactactactgcagaaattcataagagccaaaaccttaaaaaaatagacctggtacttaagtgaaagtactaaagggaagaccagaccaaacatcacagcagttgctgccacattgtttcagcccacttagatttatctttcaaatgtacaattctgtattgaacatctcccagccatcttcaggaaatcgaatcaagtaaatcctttccaaccgaaaacatttcaactaactatagagaggcagactcatttttactaaaataatttatacagttagttattttcgttctccgtacttacccatttatctttatttaatcgtctctactgcctaggaaaataactattttccaggacgggttatttgttctgcgatcatttaaaatttggagaaaggtcaggattagtgttaatatcagctgcagtttctcaatctctaggaatcctgcagtaaaacaagccccttggtgagctggaagatttgtgcccagtgacaaagagatagtttgtaaaatgctgtgtaattgtaagttaccacaaatgaaaatacatgacagcacaatgtggcccgtagaaaattcccctgagccagcttctgcactttcatcaccgaatctgaacatttgctatgtctgaaggcaaatttatgatggaatgttagtttggattctttccagatgctacctaaatgcagtgtggggtcattgccttgctttgcgatgacagtttctttgaaaatatgcaaagtcataagctcatgttaaggtttttcaagagtctgcctcctactacacaaaggaaagcaagggaaaggaaatgaccctggcaaacagtagggaagggtgtattcaaacatttcattttcaaaaccttcgggttagaataccacttacacatgtattctgagagacagaattcatgaggaactcatctctctttataactggaaacacaccagcttgatatattgctaatccatactaaaatcatattattgggttttttctgaatcaggcctgtattaatggtacagtatttattcagaatggaattctaaaattactaacaaacttgttgaaaatttgaatacctccacaccaacctaaaaatggaccttaagttcctagaacctctgatgttcttttaaattaatggaaaaataatttgtgaactgtatatagagagtgcattcataaatgtgattatgtattttatcacaaatccaaaatgtcaatattagagtctattttgcttatattttaagcaattatacgtttttgcaattcattgatgatgtatcattttcaaactgctttaaatatccattagaaacaaatatttgaagcttttacttaatagtgattaccttgaactgtgcatttctagtttgtaatacgtatttggttggttcgtgcctttagtttgttaaagttacatttgtattatattcaggaaatgcactttttattacttacagctgtggttttaatactgccttgaactattattattctttttacaactcctaaagcttgagggaggaaagaaaaaaaaaacaaaactactaatcagtagt

SEQ ID NO: 17403 - DNA, 1828 bp, Homo sapiens
ggatgaccgccttgtactccaggtacacagatttacctttcagttccgcccgactgcccttcatgctgcatttttttgcttttaactctgtgcgtcttttgttttccaggtggaaccagcccagcttaatttgtactcctccaagcagagagagtgagtggtcctttggtcaatgaaaacttggctttaagactttttgactcctttccaacaccatcttttggaattttcatacaaagaaatttggttaatcgttaatctttagttgcattctctctttgagtgattcatacattctgtttctttaagaagatgcagtcatggtctttcagttatgtatatttgttttccttgtttttcctcgttaccaatattacaacagcattgttttcagttatttttcattgcagatacgaagagaaaattttctagtaagcaaggtgttcctacatcttttctggagagcttaccatagttttatagcattgttcaattggaaaagtacattccaagttctagattacctacgtttggaaacacttaatttacaaattgtgatcttagtgtatatagtttttacgttgttggtgctaaagtgcttttttgaagtttattctctttcaaaataagttatcatagaatcttgtgcttgtatcaaactcctaattggtcggaacactttaggagtgcaggggttctgcttcattgcattttcagaattaacctgaaagttgaaacaaccatttttttttatttcaaaacttatttaagttgttatcacctgtccttaaatagataaaagaatgtgtattttttcacttgttgccttagtactatcaagacttgtgaatatatttgaatgtatgttgtttgaaaaacttgcacagggcattggagccatcatgaaaagcaggaaatgtaaacgtggaatgtatggcaggctgggcagaatgtatactgatccagggtatagactagatatttttgctgttgctgtttttattataaaatgttatatttgaggatatttaacattttccaattctgcttaagaggtaattcacaataaaaaaaacaaagaccaaaaatagcacattctgaaaaaaagattcttaataagattttattttgtgaagttcaaagattctttcctaaagtataacgtgttgttaaaaagtagtggtgttataactctcaatgtaatagtatgcaatatcaagaacacaggaagttcgtttcaagataggtgagatttaaaataaataggatgaggttgaagaaaagtatattggagcgcagataaatataaattgtggactgctatgaaaacaggttgtacttctccatatgtgagactactggaagtgagaagcaatatttgtcatttctaaaactggccaggctgtgctgacccaggattagtaatttgttatgtctgttttcccttagatgtttgggcactcagatgctatcttggtgcacacacacaacattgctgttcagtcacaaatccgaacaacttaatataataaattgtactaaaagtcatttaagaaataccaaaaagtaagcttttgtttctaaccattgttataaaggctaatataattgttgttatatagcagtaagatatatttgtgtgcatgcgtctccaagtcagttgtaaatgtcttgagaacagagaatacaattgtcatctttatattgcctcatttctccactaatacttagcaaataaaaggcaataagtaaatatgtactggttgaatgcctctggagacctagagtttaaagttttaagtcaataaataaataaatatttactctt

SEQ ID NO: 17404 - DNA, 114 bp, Homo sapiens
agatccttgagcagaggagacatcttgaagtgtcagattacaggagtaccagtgggagatggcattttcttctgggcttcagcatgatgttcaataaaagttttgccatttcaa

SEQ ID NO: 17405 - DNA, 799 bp, Homo sapiens
atttaacattgttgggccatttaaaatgtgcatattggagcagaacattaaatctgtttccattttagtcacagaaaagaaaagcagagtcagctactgagagctctggaaagaaggatgtcaagaaggtgaaatcctaaagcctagaaataaagttttaaatgggaaactgctattttcttgttcccatcttcaaatgctaattgccagttccagtgtattcatggtactctaagaaaaatctctttggttttgatttcttgcatattttatatattttacaatgctttctacctgaaatgtgtagctttatattttatggcattctagtatttttgtgtactgtattttgtgcatttcatgtcttcatcaaaatcctctcagtccttgttcttttgaagcttgtgctgaggttttagcttttctatgttttatatgccgctgctttgaaagagaacctagattctatagttgtattattgttgtttcatactttaaatttatatggctgtggaaaaacgaattaaaatgttttgaggagaaagactttttcacttctttgttgctttcttttctattgagtctgggcttgtttgtgttactgcatactgtgattagcataataattgtttctttgaggtcatctaaatatttttttcctaaaggaataaagggtgaggaaagaaaaatattaaaaaagctaatatttgatactgtgcttgctgtcagtatgcattacatttaaattattctctattcaagtgggaaaatataataaagaaatgtctataagaaattt

SEQ ID NO: 17406 - DNA, 1431 bp, Homo sapiens
cctatctatggaagagacttttgtttgtgtttaattagggctatgagagatttcaggtgagaagttaaacctgagacagagagcaagtaagctgtcccttttaactgtttttctttggtctttagtcacccagttgcacactggcattttcttgctgcaagcttttttaaatttctgaactcaaggcagtggcagaagatgtcagtcacctctgataactggaaaaatgggtctcttgggccctggcactggttctccatggcctcagccacagggtccccttggaccccctctcttccctccagatcccagccctcctgcttggggtcactggtctcattctggggctaaaagtttttgagactggctcaaatcctcccaagctgctgcacgtgctgagtccagaggcagtcacagagacctctggccaggggatcctaactgggttcttggggtcttcaggactgaagaggagggagagtggggtcagaagattctcctggccaccaagtgccagcattgcccacaaatccttttaggaatgggacaggtaccttccacttgttgtatttattagtgtagcttctcctttgtctcccatccactctgacacctaagccccactcttttcccattagatatatgtaagtagttgtagtagagataataattgacatttctcgtagactacccagaaacttttttaatacctgtgccattctcaataagaatttatgagatgccagcggcatagcccttcacactctctgtctcatctctcctcctttctcattagccccttttaatttgtttttccttttgactcctgctcccattaggagcaggaatggcagtaataaaagtctgcactttggtcatttcttttcctcagaggaagcctgagtgctcacttaaacactatcccctcagactccctgtgtgaggcctgcagaggccctgaatgcacaaatgggaaaccaaggcacagagaggctctcctctcctctcctctcccccgatgtaccctcaaaaaaaaaaaaatgctaaccagttcttccattaagcctcggctgagtgagggaaagcccagcactgctgccctctcgggtaactcaccctaaggcctcggcccacctctggctatggtaaccacactgggggcttcctccaagccccgctcttccagcacttccaccggcagagtcccagagccacttcaccctgggggtgggctgtggcccccagtcagctctgctcaggacctgctctatttcagggaagaagatttatgtattatatgtggctatatttcctagagcacctgtgttttcctctttctaagccagggtcctgtctggatgacttatgcggtgggggagtgtaaaccagaacttttcatctatttgaaggcgattaaactgtgtctaatgc

SEQ ID NO: 17407 - DNA, 2569 bp, Homo sapiens
gactgaaggggcccccaagtgcccacccccggcggttatgtctcctccatagattggtctgcttctctggaggcctcacgtccattcagctctcacctcgcacctgctgtagccaccagtgggcccagctcttctcacctgcctgcttcccccagtggcgtgctcctggctgtagtttggatgattcccgttctctcacaagaatccgtccagtccatcttcctggcccctccctggactgactttggagacctagccccagaaagcctcccttcttctccaggtcccctccgccctagtccctgcctgtctcatctaacgccccaaaccttcatttgggccttccttcctcatgtctgccctgagcgcggggtggaagtgctcccttctgtgggctccagcagatcccttgttttcctgtcagttggacccctcacctggcctccagggaagaatgcagagaaaagcaaggagagactctagttaagaggtgctggctgcggggatccagacagggcacattgggggcatggaagtgccagggtggttttcaggagctctggtgaagtgggtggagcatcagcgtttgctcagttaagggagaggtagagaggggcccgtgaagtcctttgtcacttctcttgccttagtgtgcctcccaatactcccttcttcctgcccccacaccccatccccagctagcccaagctccaggtcaggaggggagggtgctgggcctgacatggctatataccctcccaggagtaaaagccaagcaagaggttgtttttgccaagaatcacagaatgttagagctgacaggacccttgaaggtcacttagccttcttaggcaaacgcctgcaaaacagaagcctggagaggggagtgacctgctcagagtcattgcagagccgggatggggaccaggtctcccatctcctactttatgacgccctcttccctcttgatgatgtcttttcaaagcaaatgaagtgccttttcccgaggctggggctgggggtggctgggaggggaagggaagggagaggcaagctggctgtgaactgtcctgttgtggggctggagctgctcccacctccctgacctacccctgctgcaccattcccccagctgggctggaaggttccataactggccagctgcccccataactggcagcattcccagacccagggtactctaataggggcggctcaggcactgagactaccgctcaaccccagggtggttttcaggagtccgaggtagccttcaatcactggactccatggccttcccttcgtgttgaccggaccttccttccagggcttttcctttgggggaggcggagaggggagaagaaggaagggaagggcagaaggaaggagggaagaaaagaaagcaaaggaacagaaggaaggaaagaaagatgggaggaagtgcagcaggaatagcaccctctccccgggaggccctagcttccgtgaggggccatcaccagccattccttggagggggctttctccccttttgcttgagcagggttcccaggagggagaaagagaagacaagagcctgatgcccaactttgtgtgtgtggggacgggggagtcagggccccccaagtcccacaatagccccaatgtttgcctatccacctcccccaagcccctttacctatgctgctgctaacgctgctgctgctgctgctgctgcttaaaggctcatgcttggagtggggactggtcggtgcccagaaagtctcttctgccactgacgcccccatcagggattgggccttctttcccccttcctttctgtgtctcctgcctcatcggcctgccatgacctgcagccaagcccagccccgtggggaaggggagaaagtgggggatggctaagaaagctgggagatagggaacagaagagggtagtgggtgggctaggggggctgccttatttaaagtggttgtttatgattcttatactaatttatacaaagatattaaggccctgttcattaagaaattgttcccttcccctgtgttcaatgtttgtaaagattgttctgtgtaaatatgtctttataataaacagttaaaagctgacagttcgcccttactcttggaggtcatgttcaggaggggcattcctttcccctgggggtcatgggtgtccccatgcccacatattgcacgtgcagggaggtaagtgcctgcatcccaaatcggttctaggtcaactggcctcaaactgatttgccatgagctcacaaaatgaatccctatgcttaatgaccaggtcacataaaatccagcccacttacaggttttctggcatctgtttgggtgtcctaatttttttggcagtgtcatttgaagaatttttttaaagcagtttatttaagaacatactgattaaatgcaggatcgctactaaaaattgttttgtatccttggtgggtgtcttctgctattttatctacttttgaacactttcaggactttttagccagtttgcctttcttgaaaaatgttatgttttcagcaataaatacatttgataatg

SEQ ID NO: 17408 - DNA, 1791 bp, Homo sapiens
gcaaaggggtcagggcaagtgtgacccaccaggcaaaattgagcagcattttcatagggaccgacttcagtagcacacctgcccctgcatttcagtgggatgtcaatacacttgaccccaagtcccccggccctgcctggtgtcactgtggccaaacagtgcccagcttaagcatccctggcatcagactatggccttcaagagcactagggcatatgcttttggcagcataacgggctgacttggtgatggagggaaaaagccttgagccaggcagaagtttgtggccagggtttgtgcagcagctttgtgagaagagcccttctacctggctctatctcactggctgcattccctacacagggaatttactaccctatatgtgaatatccctgtatgtacttgtgtgtacttgttggtctgtatcttagtttctttggggaggacagggctgtagctgtgaggtcttgtctccaagggtgtgtgtatgtctccgtggatcagccacagggatagggattttgtttttaagggaaagcattctctaattccctttgttcatgccgagattcagttgctctgagactatggggtacaagtttgatcctccgaatctggagatgttgtagagctggaacgagtgcagagtaggaacgctttgatgcgcatgcacattggggaagatgcgctcctcagggacacaaaggccgagtggggtaaaaccacgaagggagggaagggaagtcagctctgggagcagccctcactggctggaccaaggtactcttcctggagtttgccgtgttagcaaccacagtcaccttgcagtcaggctggaatcttgggccaccccaaagtgctttgctgaaggatttagacggggatgaagtgccctccagcctcagagctagccacaaagcccccagagctgaattcattgagtatttgtgcctagggcttgggctgtttgtgtgataccggccccccgccagacaatagcctttgctgacaccccagcctacttccccgatcctgggctccctcttgattactttttgacattttccagctgtcaggcatcactgcggctagtccggcagcgacctagatggggtccacccccattcctgctcaagcatgggcacctaccacatggtttctgctgctcagcctgcctgcaactcacctcgaaggcggaccagcctgcctctgtgatgactgcagcagacctccttgggtgtaccaatgcccctcatctcccactttcacacctaaccctgactccttcaccaagaagacgggagtcggcagccaggagttcccgtggcacctctctctcttcgtggctccctgcttcccccttccctctttccgaggaagggtcaacctattctctctcaaagccaacccctaggccaattgcctggatctcctcccctctcccttctttaaacgagcttgcctccctcctgccaagtttgagggcaaggctaagaaatgtcagccacggaaacaactctattatctggtgactttgggtaatgtgaatcagtgcctgaggacctttgctgtgtccttggtacagaaccatccacttgacctaactacctcccctggccgcgctctcgctcttctcttctttgttaagccaacaactatcaccctctcctactcttcttctccctgccccctggagggcactgtgtttggttgtgcaaatgtatttactatgcgtgtttccagcagttggcattaaagtgcctttttctaataaaatcagtttattatgac

SEQ ID NO: 17409 - DNA, 192 bp, Homo sapiens
agccccacagtggaattggcaaacccactgcagcccctgagaggaggtcgaatgggtaaaggagcatttttttattcagcagactttctctgtgtatgagtgtgaatgatcaagtcctttgtgaatattttcaactatgtaggtaaattcttaatgttcacatagtgaaataaattctgattcttctaaatt

SEQ ID NO: 17410 - DNA, 2263 bp, Homo sapiens
attcctgctccatggagttcatgcaacctggtgcaagacaagttggaagttcctaagttcaaagttctgaagtattttctcacacaaagggcagttaaacagccaagtttatgacactagctctcattattcagctcttttcagctttcagatgccactacattgttattccaccttatctttgcgtcaggttaacatatcttaacatatttttttctccagttggctctctccaaaaatgccttttgtttttctctgctatacttgacttgccttcagaatattacattccagataatatgactgttcatctttttctgtctgttttgtctgctttcttaatttcttataagtcttacatgtttaggtcagataaccattttttcttcattccttgttcattactgttctatttttcatatttttcaaatgaagaagcaacacataagtttcaaaaaatatccagggtactcctggacagtgtccccttttgatggacacaactgatacctgttctttctttccaagaaatgtgaattatttgactgtgagacgtcctctagtttgtggccttcagaaatcagatcttggggagagtcccttcctacctgactgacctcccataaggctgatgctgatttggccagagatgacctcaaggcccaccaaatagagcacaacttcccattgggagctttggcttttgatcttaagcttatgggtcgattctaaccaagaaaagtccatgagatcagtgcttcaacatccaggttgacgtttaaccattttggctgctgctctttaattttcctctagcaggcatgcagtccaaggaatatcaaaattctgattgtatgggaaccaaggttactttcttgttcttggataaagaaaatttctacaattacagttcccaaagacacagttgttcatgttatttaaagttttatccagtattctaggaattttcagcaatactaatattctcatttttaaacattttttacattttattttgttttattttggtagcttggttttatattgtttttagatcagtgcttcaacatccaggctgacgtttagccattttggctgctgttctttaatcttcctctagcaggcatgcagtccaaggaatatcaaaattctggttgtattgggaaccaaggttactttcttgtttttggaaaaacaaaatttctacaattacagttcccaaagtcagttattcatgttttcatttaaagttttatccaatattctaggaattttcagcaatactgatattcactttattttttttctttttttaagacagagtcttgctctgtcacccaggctggagtgcagtggcgcgatcttggctcactgcaagctccgcctcctgggttcacgccattctcctgcctcagtctcccaagtacctgggatgacaggcgcctgccaccacgcccggctaatttttaattttttgtatttttagtagagacagggtttcaccatgttagccaggatggtctcgatctcctgacgtcgtgatcagtccgcctcgtcctcccaaagtgctgggattacaggtgtgagccactgcacccgaccgatactcacatttttaaactttttttttaattttattttggtagctaggttttatattgttcttaaatttattttactctattttatttttccatcacttctttgtcccagattcatgaaatttgctgatgtccattttatgtctacttttgaactcttctctttgtgtttgttttgttcttattacaaactccaagacatttcttagaattgtctacagatttcgtgtagctacttattggtagcttcttaatttcatacttgtccagaccattagacattattacatgctctgtcttgggcctatcattaacattagcttagggattctgatttcaaagacataaagaattggcaaaactcttcttacagaacttaaaacaagttttaaagttacatttctatacatctaatacataataccttcttagccattaatgtaattcctctggataaagataatatattcaaaaaatattgggaccaaaaaatgcacttgtttcttgctcatatatatatagatgtatattttttttaatttcttgtttgtttattttggttacattgaatacagatttgctgaacagttttgatgttatttttttaataaaatttgtattgttaaagtgccttggaaatttctaataaataacttcatata

SEQ ID NO: 17411 - DNA, 1929 bp, Homo sapiens
atctctttgcctaacaacttgggatcctgaagataaatatgtgttggacaagcatagaaagtgatttatatttttaatggttttcaagtggaagttcctttgaatttgtcagttcattcctggaaaatcttttgagttaaaataaggatcctaggacagcacctcgaactacaggccctaaagagaaattgcctcaaaccacaagtgctgtaacttcctcccctttctgtcaattggttgtctttaaatattgcaaaagtcctgatgctaaacagtatttggagtgttttcagtgtctgtactactgttgtagaccttggtatttttttaaacactgttaactgaaatgttttgatgatttgtatgtgatttgtgtttctaaacttctctttacattaatgttgttactggtgaaaggcatgagagcagcactaagtcctctgtgtaactgccattgtctttccaatccccagtagaccagtaaataaataacacatcagtgtcttctagaaggtgcctgaccaggttcaccttttaaacgacaaagcatggtttgtggctttttgcaaaattactatgaaccaaaagttgacaaatgttccaaagttattttctctaacatatcacattaaagatctgtttcagaattgtaaaaagtacatctagatgtgtttacagaaagcaagtatccagtatgactggcatgtgttcatgctattcagaatcacttgtaaatagtctgcttttaaaggagggcatgttcagttttctgtgaattaaaatatgctcatgtgtgggcacacacgcacaaacacacacacgcacgcacacagtggcagaagggatttatattaatattctttcccctctggccttcttacagtctgttggtccctttgcttctgttgtcagtgtgttgaattgcaaaccgagtactgctgtaaatactatgtttacttcatgctgaatgtttgcaaagacttgatataagtattaatagtaatgaatcaatgaataaataatgagctagggtttgtgaggctttctacaaataggtcagctccacctggagtgcgaattgccagagacaccttggtagtgcccatcggcaaatcgcaatggcagcatgtgagtggaccattcagaaacttctgcttggtggaaagtaaacagagaggatggaggtttggggcgaatgtcctgaggcagagatggtctttattgtgtgtggtggtggttgtggtatttataataatgcaagcataccctcccttgagtctcaattgaagataaaagaatgtactgagcaagcaaagccaatggagagtatttcacaaaaatactttgtaaatgagatgccagtagtgttcaaagttgtatttttaaaagataaatattcctttttatacctcagttttgtgtcctgtttttaatgacttacgctctaagtaatccattagtagttatctcagttccttcctttgggttactagaatgttggaaaaagatgccaagtctgtcttgacaactggaaacagggttccacagcagcccattcgtgctgaaaactggcttccccctgaagcaccctgctgtggcaccagcaggaagctcaggttaattttacactagcttgctcactgatgcatctctcatcaatgctacggaaggctttgattcatcagtctcgggctcttggaatacctaattttaataatatctatgaaatcaagggaaactttccatttacagttatttcttgtttaaataaactaaattaatttttaggggagagcagtaggaaaaagagctaatgcatgcggggtttaatacctaggtgatgggttgaggtgcagcaaaaccaccatggcacacgttcacctatgtaacaaacctgcacatcctgcacatgtaccccggaacttactt

SEQ ID NO: 17412 - DNA, 949 bp, Homo sapiens
gctagggtttctgattttactttcctcagccagtttctaggccctgcaaggccccatgagctacagtcgtttgaagttttactgagatataaattagaatggcatgtgctgcaaggcagatgtatgggagccaatcatttggctagtaaaggagcccagccaactggccagcagcttcagctcatcacagctttgttgttctcaacttgttgaatatcatgcattcattcattaattcaaccagtatttattgagcacctaatatgtgccaggcactgccactgcaatcttataaatggagttttaaatttgcaaatgtattttatttgtaattgttatttttatgtgtggaaaacagaatggattgctagtgttggtgagtaaaaacaaaaaaaaacaaatgacaaagaatgtgatagctcatattttagaaatggctttataaatcaccttggttccctatcagtagagctagtaaggcagcaccaatctctaaatatagaagaaatttccccaaaatgtaaaatgccagacatgtcccagcccgaactcccccaccccatggcctggaggtttctagatggaattggccacatttgctttagtctctctatccagctaaataggcttggggaaagctgtggtgctacagaaagtaccctagacttagaagcagtaatactggtttctagttctatttctgacactgcctccctgtgtggtcttgagcaagtcacttcacttttctgtgctttggcttcctctactctaaaaatgggataacagtatctatctgatctactgtgtaatgcttctctctgtgcctcagcttcctgatctgcaaaattggtttaataataatgcctacctcacagggttgttgtgaggatttgcctaaatatatatgtacagtgcctggcatataagttctcaataaatggtagatatt

SEQ ID NO: 17413 - DNA, 287 bp, Homo sapiens
taatctcctcctttacaagagctttcctctcctctctcttgctctcagagacctataaatccaaccagttaccctgcaagtcagccccatctgctgttccttggtctctaatcacctgagctgggtaaaggggattctgggagttgagagctctgccagggtgagatgtttcctgaagagaggttccccacccctgtaactcctcactgtactgatttactggcgcatgaaattctattaaaaatgcattcttctgaataaaaagagtattcactatttaacttcaa

SEQ ID NO: 17414 - DNA, 877 bp, Homo sapiens
aagtgtgaacctatggacatttctgagccagttccatgttaccgacttaggcagaaaataatgaagttgtagaaaccattttcttggttactacatattcattggtattaaggaaatctcattttggatgcctgccttatgaaagatccagctgttgcctcattccttgagtttcactcttccattacctctgaagggactttagaacatgccctctcctcaccagcactgtggcaaggcaaggtgggtatttgtcatctccactgcatacttcctcatagagacattgtgagtgaaggtcaggctcttcaatgctgaagaatggtgacagtatgggttggcatatggaattagcgtctaatggcatttagtgatttagtagattgtgactgtgttgatctttgtgctcttaaacaacactgaacaaatatttcagtctttactatttgtgtggggcccagtagaaatggtcttgtaatatgctaaatacttccatttttataacatataaaagcagagcatggccctcctacagcctcaggaaggaggtggtggcatagatcctctcaagagaatacaggtttagaattaatctaggacttggcagaattctaaacctaggaaattcatgaattaaatcaatttctagagccagacataaaccagatgaaagtatcatgttgttttacttataacttctatattcttatctactatatctagtaaaagagaaacattatcaggtcagtttgtttatctaatatttcctgccagaatttattttttgtcatagcttcttgcatgtatgcaggccaggaaatgaatgttattgtaataaagtgtgatggaaaatccaggtaattaaaaaataaattat

SEQ ID NO: 17415 - DNA, 2562 bp, Homo sapiens
ataaaactcagaggaaatttgcacagatgctgctttggagaactttacaacctgggttgcagaactgagccttggtaaacctgtctctattacagcatgttgccatacatctatttaagtgcataaggtctttggccttcaagatccatcgaccttaaacaggaatgcttagcacgtttaccatacgtttaaaatccattctttatcaatcagtccttttatagctttctaagttcttattgatggctaatatacaagggttaatttttaatattttaattgatttctttaatcagtttctcgacttgtatttattaaatactcaaactcagtattacctactcaatgccttttaaaagaaagttataatggagaaaaaattgagccttaaacaaatggttacttctgtatattacctcgtaccagtgcttcatcctatttgtaaaatctttctcctttaaaattattggttaatactttgagactttgtttacgtgtggcagtgttgtaaaaagaaactaaagatcacattttacctgtatggatggaatatcccttttcttcaagtgcagtttgtgatgtgttttgtttttttttttttttttttgtaattaacatgttctgaaggttacaattgatatttgaaattgactgtagagcatttagttgaagagttaagcattcagttccattaggttttcacatgtgttaatctcatttacagcattgaattgcggcagtaacattttcctttctgtgaagttctaaatttagttatgacctatttagcaatgcctttgaaaagggatattgtatccatggtaaattaattgtatacctaaacagagatagctcatctttgcctatcaggcttgtaattgacatctagtagacttctgcacatgtaaaattgaattcaaataaaatcatacacactttctagttcttaatatttgtctttctgaataatagtttaaagcaatatttgttaaagttttcttgcactatcacaattgctttttagttatttctcaagaagcatgttcgtattagagacaaaatctgtgtaacaggagggagaatagcgccaagtctctgggctattttttatttttgcaaatgtgctttctaatagccattgccttccatgttgtttacctaatcagcatatttttgtctgaatacttgaacattttaacagtaacgcaggtgtagaatcagaaaggaaacttatgcagagtaatattttggttcagttttaacatcgtgacaatgagggctttttctagcaatgatttttaaattgtgtaagtttgacagtattttattgttgggtttttatttgattttagttgtgtgcttttcatttgcagaagttagtaactgcagctcacctactgcaccaaagttctcgattttaggagcccagctttagtcatttgaacatgcttctaaataaaataaaacaaaaccaaaactatacttttgatctataataagagctcaataactttgtcaaggaaagctctaatatatgcagtgatggtttatgaaagggtgtggcaattttaaatttatattgtgtgtgatgttcaaataaagtggtatctacattcatgtgatttatgggtcagcatgaccattaattactgagtagaaattgactaaactttgatttcctttttttaaatcgtgttgcatttgattcctgagcaaattccctcaaagtgaactcttgttcttaaattttgaattttatggtgagattgtaaagatagaggcaattgaaacattgttccttatttatgaactgcttgaagtgaatacttaatttaagtttgcactttaataccaaacttaaaaccaaacactcatttaaaagtaggttaagtgatcatggatcattgttattagctttgtggctttgtgaaattctaaaggaatcaaataattcatcatgatttaaattttctagagattttgatttttttataatgtttctttcctgtagattgtgttcttgtttctctctctctctctctctctctctctctctctctctctctctctctctctctctcaaaattacagtgttcattgtcattgacctcagcagcaaatttgacttgaattcacttaggatcgcaggaatcaggggaaagtgattttaaaggtggtttctccagcacattttaagaaaagggaccaaaagttattttagcttcctcaatagattgcatgttgcttattaggataataaattaatattaaatgcaatatatgtcttgtctttattatggcatctatttaggagttgttcaaatcactgcagtagggctctgcaaataaaataatgtaacctattatcatggatctaatgtactgtaactttatcagtgaaaggtaaaatctcaaataacaagtacaaacattgaacaattacctataaagatttgtaaaagtaaaatttttccaatagatttcattcttgtcattttgtaagacgaccctgcagtccacctgtttgtaacttttttaataaaatagacatctgtattactg

SEQ ID NO: 17416 - DNA, 1527 bp, Homo sapiens
ctgaaattctgaacagcagagttatggagtatcagaatctttccatggaaacctccatatggcctttctatatatattctcgtatgtcttattctaccaacacaacaataagcgtgttgcagtcaatgtattaagcaaagcaaacctgccagccagcaaattcaaataaaaaataaagcattaaaaatcaatggagatgttaaaacaacacaaatagaaaactagtaactaccatccatcctatttgaattatcaagcagaacatgaccataaaatttggtaacttgttacattactctttgtgattttctaataaccatgctaagtgtatttccacagtgagcttttggcttactatatacattcttggtggataaattgttcatctgtttttgaagtgttaccttactattttgtttacaagatagtctattgggttgattcaggatgtaacaaatatattcagtaccatttcttgtgttgtattgtgttgtgctgtgttaggtttttacatactgtagtgttttgctgtatatgtgtggtgtttgatttcaactaaagtgttattagtggggaacagaagtatatgtgcttaagaacatgacaggttcatgcaaatatgctctctttctttagaatatttctgtaggtttcttgggactgacatttaaaacgcctcacttttgaatgtgcacaaaacctgctcattaacatgcatgtgtataatttgtacctgcagatctgatgttgcataatacaatcaaattactagattttttaaagagagaaataattacctgcacaaagcagagaacttcataaaacattaacccctaattcactcttcttaaatagcttggcaaataagactttacctttaaatgaatttctcagcatttatactaaaaattatgtaaagtgctcattagattttttgtgtgtgtggcttgagaatcccatctcctaaattgagtgtctaaaactgagccatttgtcatcttcagctgagaaactggtacttgggagcttaaaaatatgctaattacaagttataaatcaaacggagagatgggggcatggagatagtttttacgtactggaggaaagtgtgtaaaaccatggcaatgtcaccttttacacaaatgccattttccaaatgcaaatggctcatgctctttagactactctttgaataacaagtaagatgcaatctagcaaaagtcagtcagggtgaaagagaattggttgcaaatgaggacttccctccccaaatggacagtcttctctgttgatcacagagggagcctgagtacaggcttggagaaatggctaggacagggaacagggaagcacttacaattattccttgatttattcaaaagaactgggaaagatggttgtagttgtctttagcttcggttcaactgagtttcgttttgttaaacagttcagtgaaggagaaagcacctgtgatatatggcaagtgtccccctgcccaaactttaacatcagaccctctcacatcat

SEQ ID NO: 17417 - DNA, 2213 bp, Homo sapiens
atggctcaaaaaggcctgtacatacttctcccaaagcgccactgaaaagatggcatagcttaaaagatgaaagtgtccaaacacatcctgcttccttcattggggaagttttaaaaaaaagtttagatgttgcctttacagttgcctttcaattcagtgttatactgtgtgtaggtaaaacaaatctcaatatggaattaaattgtctttttggggttggactaaatatgaaatccgaaagccaaaccagactcaccagaaattgctgtttagatattttaagaagttcttaaattagttatggagacaaagtgaaaacataaaatgtgaccatttaacttatggctaagaaatggactttaaattattcatgatacactgttaaaacccaatcttggaatcaaatattttttccaggggtgagaataagtataaacataaagcaactaaaatgaaacataaaaccttttattttcttctgattttaacaaggaatctatttaaatagaataacaactgatggtgaatcttaccgagctgtagaaaataaaaaattcctctccaaacatgggtagttttatgtcaaaatattggcttttcaagaacaggactcatatcttgatatttaagagatgtttaaaattttaaactttttctaccttctactgtttaaaggttttacacagggtgtatctcacattaaacaaaacacctttttttcaaaatgaaataccaatgtaaagatctaatttccaggcgctttcagggcactgtaatttcaacaatactggaatcattttggcgctgcttctcattcattttaaggcttctctgaattgtgctcattccaaattaacccatgtatagaatctttcttcatcatctaaatggtgtgttgctgaagttattgtggtatataatcctggattaaagtcaggactttctttctatagaattattttatcaatatttgtgtagtgaggtcctaatcaagaaacttgaacaggataatgtgtctaaaaatattgctgaagttattcttgatcagatagaatttaacctaaaatgtgaactcttacttactttttgtacatctctattgtaatgtttccagttgggccaactatttctagccctttagttctttttcatgttgacagatttgtagacaattacaaaagccaaaaaaggataaaataagcattaggaaggctagccagttattcaatagcaccttgataatgtgggcaaacccttctacaaagtttttgttttgaaaagagcaaaagtaaaaagtgttctgtagtgaggttacatatcaggaacatatgagttgagcagagtaatttggtagtgtaagtcgatgcaaaaatacttctatggtacctattacaagctgaccaagataaaaagaagtatgtaacccactgtgctgtcaagcatcatgattccgggcagttttcattttactgtggattttgctatacttatgcaaggacttacactaacctcctggctgtaaatcaaacaaggtgactgaaagtggcatttatgttttcacaagggacatgcttagaagtgtgaccataaagtcacatcttgtacaatctgctcatgtgtttcatctgtagtaatatagccacaaactggacaagaagctgggtatttgggtttaaaatagattttcttgactctgagcttgtatcagtatttctagcttttgttttgtctgacagtattgcagtcttgaaaatcctgagagctaaaaaactgaaaggaatttttccacaccttgaagtcacagtgttttagagtaaaactattttgtgtacaattgtgtttttaaaatagttagtagatcactatggtatttcaattttctttagttttaattgaaaatgtttgcttttaaaactgataggtattgttggaaagcaggatgaagcctgagccagtggaaaagcttgttacagaaaaaacattttgtgttattgctgtggtgtgcatgatttgcaaagattaagtgcattttctctgtctatactgattattgtatatagaggatgttataaatatacatatacatttttgccattatgtaaatcccatgatttcaactgtaaacatctgtccattggtgtagctttacaaaccattcactgattttgtgtaatttaacaatagatatgaaataaagtttaaattacaggctc

SEQ ID NO: 17418 - DNA, 373 bp, Homo sapiens
cgtcctctcgccttaagattcagcttcaggaaaacatttagggaaaagaaactttttttttttttttaatgtgaggttttctgtttcttttttgcctactcccaagaagatattggtaagctatagaatttagatatgcacctctgataagcaaggattgtttcccgtatgattaagacgtgctgttgatgtgtgttttgataccagtgtgctgacacagaatctttatttactttttaggattttgtgttttcattttctatttttctttaaatgcagagttcattgttgccccttaacagtttttcctgagtttactgaagaaattgtacttcatccacatccatgaaaataaaatgctctccttttgtgc

SEQ ID NO: 17419 - DNA, 1831 bp, Homo sapiens
ttctcaaactctgagaaaaagtgttcatcaaaaagttaaaaggcaccagttatcacttttctaccatcctagtgactttgctttttaaatgaatggacaacaatgtacagtttttactatgtggccactggtttaagaagtgctgactttgttttctcattcagttttgggaggaaaagggactgtgcattgagttggttcctgctcccccaaaccatgttaaacgtggctaacagtgtaggtacagaactatagttagttgtgcatttgtgattttatcactctattatttgtttgtatgtttttttctcatttcgtttgtgggtttttttttccaactgtgatctcgccttgtttcttacaagcaaaccagggtcccttcttggcacgtaacatgtacgtatttctgaaatattaaatagctgtacagaagcaggttttatttatcatgttatcttattaaaagaaaaagcccaaaaagcagtaaaatttccatttctccctgttattttagttgccttatctggagagacgtggaggtgattttcttttttttaaattattattaagacagaatgtgagggcacaagcaggcttctgagccacttgtcagattgtattcaaagcatcaatccaagaaggaggttatgtgtacttcatttattggtgatagttggaagagactgcagactactgctttgaatgagttgaattacataagctaagatcactataggtccatttcttgaacccacttatacataaaatgtaacccatttagaaaaagattctggatatcatcccccttgaaagatagaaagcattcaggatgtcccagttatcacatgttcacacttgggtttaggggtgtttttttttaaaaccaggcaggttagctagcccaccctgtgctagttttcatgttcacactgaccctatttgaattaatatcctttgttagagtggtcgagatttcaaacccaattatgtacagggagctgtctgagagctagccagaactggggtacagcctgggctcagggaatagctgtcaacactcgggcaaagtttttgtctgtgcatgtgtatctccatttgttttgggatcccagtttttgttttaagagagtataaggtgtctcatttgagtctttttcttacctagccccctcttatcagtaaaacaaaggacttgccatggttcacagcaatgtgctacgatccaagatatcagccaaggagcccacttaggggagaactaggtgtccagatttttgtatgtgttgtttttcttgggggatggggtggggtgggagtaggtagagctgagaatactacatcttagtggtgacctttagccacgtgggtgaagtggcaaaggccatggccatatctgttgtcccaggccaaagactaacaactgccttgggaatcccttccttgtgtccttaccaaatgatagctcataaaactctgataatgtaacaaatcactttcaaaggagttcccagaagtcttcagaaagactaaaattctgtctcttcctgctttagacagccattaagatcccaactaattttaccgaacctaaaacccacaaagaggttgtttgtgttattgttcaatcttcagttgtaagagtaattctctatttttatattgaaacataattacttgatagctcagggtctacatttcattcaactttttacaccaaattctgcagagtggtcaaaatggaatattgggggctgttgtaaacagaggcttaattttattagaagtagccagttatttattaaagcatgatgttaataaaataggcatattc

SEQ ID NO: 17420 - DNA, 374 bp, Homo sapiens
ctgcctggtgcccagcacatgtgctgccctacagcaccctgtggtcttcctcgataaagggaaccactttcttatttttttctatttttttttttttgttatcctgtatacctcctccagccatgaagtagaggactaaccatgtgttatgttttcgaaaatcaaatggtatcttttggaggaagatacattttagtggtagcatatagattgtccttttgcaaagaaagaaaaaaaaccatcaagttgtgccaaattattctcctatgtttggctgctagaacatggttaccatgtctttctctctcactccctccctttctatcgttctctctttgcatggatttctttgaaaaaaaataaattgctcaaat

SEQ ID NO: 17421 - DNA, 201 bp, Homo sapiens
tcctcaggtttggggtctcctgaagatgctatttctagaattagtatatagtgtacaaatgtctgacaaataagtgctcttgtgaccctcatgtgagcacttttgagaaagagaaacctatagcaacttcatgaattaagcctttttctatatttttatattcatgtgtaaacaaaaaataaaataaaattctgatcgcat

SEQ ID NO: 17422 - DNA, 2572 bp, Homo sapiens
cttaaccatttctgattcaacgttttaactgctgtttcctacataaaatgtttagtggggaacgcagagaactttgatccataatgaggattaaagttttacagatttcacacattctgatgctattattactctttggcatctctcttctccaaagttcaattttgtgagcctagtgaccttactagtatctggttttgctgatctcattttggatttagtgattaaatctcaaatgctgatttttgattgcttagaggaatcttttttcttagtgcctcaaaaaacacctattttgagtctatacatttaagaaaggcactgatgtgtattgcctttaatggtccttttccgcagcagtgatatgacagatttgatcagaaattctcttgcttgagagatttttttttgtcctctgttgactacatagtttcaaatctctctttatttcatgatgatatataaattgcttttaattatattaaatttttatttttctgcatcagcttcaagtacattattttgtttccctttcctgtttgagccgcttatgccatttctcacagaggggaagaaatacgtagttgctttcattactcttattgcttctttgctgttggggtgtgtgaagtgagcattgattttagtgctgagaatgtaaacggacttacaggatgcttggattagtcatcacaggttcttatgactttgctaccacagttgatatatttctcctcaaacctgttgccctaaggaatatataaaatattgttgatatttctaggtggtgttatcaaggagaagaaattcctgccttgaccagatgtgtggagcatctacaaatgaatgaatagttatttacacacaaaccactgtgtacaaaagcgtccatggagctgtcagtgtctcgagtggtattatgaggcctcaggtgccttggggtacattgtcatgctataagggatgtatatcataaggtatggtggaagaggggccttatgtgaatgattgccacatactgtttctgttgctgctttttttccgattcctttttgtcattggatttgtttgttttgtcatgtggtgaatggtgttttagttattgtgttgctgccagaatcagaatccagttcttgttcttactgccttatagttattgtgttgccaccagaatcagaatccagttcttgttcatactgccttgtagtgagggcagtttaatatctacaaagaagcttttagaagctgaaaaagtcaatgtgattgtgcattctgcttttaagaagctgtttcagctatgaactgtgtatgtgctataagtgtgaggtaccataagttatttaatttttaaaagaggaaactcctgagtgagctgtttaagaaatctgagtgtgatctattgttacgttatttataactaggtaaaatgtctgtcgtgatagatttcttttaacgttcagatactgtggttgggttgtctatatttaatatgcagatttgcctgctggaatcataatccatttttaagtgaatgtaagaaatgaaaactactgcatttgtgtcttttgaaggcaaggatccttggattttaaaggaagagtatgtgctttgaaggcactcagagactagtaatagcatatggtttgaagggaaacccattctctttcaattacaagagagcatcacttagcgtgcagtacttctgttacagcatccgatgtgtcctttattttaaattgtaaccataacagccattaatggctttatttcttgtattgctctcatctgggaaaagtctctacttcttcaaacgtaacataaatctattatgaagcttgtcccctagtatgccattataaagaaaaaattcttcgatggtatgcagtgtatctattctgtttgtaaaagatcatgtcaaaatgttctgcctctataatgataatagatggttttgtctttcaggatatttatccacctactgtcttctttgccttaaagggacacttggccatcatttttaggctcgaacttaacactgttaagaaataactgaaatatgatggtatttacattaatttttgaaattcaatggtgggatagaattaggtcaggaaatggaagttgttccaatggtgtgagaactaggagacaagatgattcactttattatttaaaccaagcttcatttttagtttttgttgtttaaatggactggaaagttaagtttttgcagggattgttttgaaataaagagatatgctaactcacagatgaactttgttaagacccctttatttttatataaagtctaatatttgaaaagcgattgttataaagtaaaattctctcttcctattctaatatatatcatatatttcaggcttctatttgaaaacaggtataagagatgatatgatacaaccctatagataatgttttttgcttgattgacttatataatcactgtttcatgattactgcttttggaataataggaagttttgtgaaatgctggccttgtgtatatcttagaatgcaaatttaataaagtgtgtatacatgcataaaattt

SEQ ID NO: 17423 - DNA, 1528 bp, Homo sapiens
gcaaggatttcaattgacttctgaagtaaatctgtcttgaaaatatgaatgtggactgccttttatctctatttcactccattaacatgcaacaaactattgaatgatttcaaataattgcaaatgtataatatatattttaaattataatttaatttgaaggactgcagaacattattttacagacagcaaggatgcttctgagtgacacctaggaaattatttgaagaaattctttttatatctatacctgttgtgtaagaaactttaaaacatttgttattttctcacctttttttctaattcactttgattgctaggggtcatgtatgcttcgaagttacaggactaaaagagcaaactgaccggcctaaaactaaaatgacatttattccctagctacaaacatcagcgttattatgttaattataccttgccctctatcattataaatggttgccatggtgtttctaaaaataagtgttttaccattaatgtgtagagggcaaacaaagcataaagtactaagggatcatgcttatcctagggtctcacagaagagaggacatatttaattaatcttgtgaattacagaacaggttgtggtccagacaccaagaatcataggggtttttttttaaaaaacctaatagaagtagggtgacctctctctttggtctaagagttctaaaggaaggtaggcatctgtttaattagttggttcaccctggctttacctctggttaatgctttgtgttaataggaaggaaaaatcactttatcttttcttccaagcccctccctgcctgacttacccagactgggattaccagataccaggtgatttatgtggagatgatttttcacctttaaactctaagccaagtgtaagaaactcttgatagctatgtctattttatatcagtcactgagacttttttttaagtttttatttattattaagacaactttgccaaaaaagtcccctaagcacaactatttacatttctttatagcctcttctgatctctaacacatatgcagttttaactgttattttcatagtaactgatcttttgtctaaggatttttacctgaaagcacaatgtattgagtctcttgaaaatcatctttcagatctttttacagaatgaacttatgcactgctactgtagtattctcaaggaatatatgtaaacacaaatgtatgcctgaggttggtttttgcagaaaacagtctctgcttctaaaaacttctatgtctagtcttccataggaaatcctcactgtttaaccatgtgaggagcctaagtcattaaacggatcatgtctgtacattgtgtaatgaatgaaaagcacataaatgtaatctactttgaactttgtaaaaatgatgtgtggaggctattcttgtttctccatctcaagtcctgtgtgtgcacgtgtgtgcaagtgcacatgtgtgtgtgtaataacacattgtaaagaacagaaattactttaaaaaataaacagaaatggagacctg

SEQ ID NO: 17424 - DNA, 774 bp, Homo sapiens
tgacaaagcatttttattctgtttatctttccttttatgagcagtaaaggggctggtttaacttaaaaggttagcttagtaagcctaaatagtattttatatatgacttttctggcaaatctaattgagacactggccagtccaactggaccaggaacccagcttagggaaataacttattaattaaaaagcatgctaaattagcttgctagtcactggaggaaaggagttcttaattaaaatgaacacggccattaaatttgaattccatatttcccattagcagcagcggattccaggatgacggaggcctgggacggcccaaaagggaacgtcggagccaaagcatttaactgaaaaggcatcagggacagcatgttaaaggcatgatttaaagttacaatttgacttcagttttgagccccgttatgctgcctgtacaacctgtattgttccatagcctctttcatcttctgtcacccacataacttgcggtgtttgttgttttacttgttccttcttccccatgctagaatgtaaactccacaatggcaggatgtcttttaatctggtttttttttttcttttttctttctttttttttttctgttgtcattaaagcatcaccaagcacttagaagagtgcctggcagactcaatgagcagataaaatgttattaagttcaatgactgaatgactgggccagcaatgatacttacctgtggttcattcatcactggttccttaggaataaaattgttgagcaatgcact

SEQ ID NO: 17425 - DNA, 1349 bp, Homo sapiens
ggaaagttaccatgtagagcttgactttagaagtggtgaaagaatacaaaattatgaggcacccaatgataggaatctgtgattaataaaacatttgggaagggtacatgttacacttcacaaaaaggaatctaagctgtctgttttattcagcattgcatcttctgtgcctagcacaagagttgatacataaggagtactttataaataaaaaaatgaaagtgtagtgatgagattcctttagctatctatctatatgtatatatctggttattcaaagcttccccacccccagtcatctaaatttttcaggtatcaagtgctcaacagacatatgatagtcaaggctcttagtctcattttttactctttgtcaagagaaatggaaaataagagtacttgggccctcttaagggagctcagagagaattactaaattagggacagtttcaatagttatcattctgtctacatgaacaatcaagaccaggactcagggaactttactctgtaacagaaagagaggattcagtgtttgccctgggagaattgtcccattcttgttgcttctctcctgagtacccactaccacaatgtcttctgtcaaggaattacaagtagcaagggaaggtctgaatgtaaggacaggcctagggaccttgcaagcacttgatatctctcctcttgctgactttgtcaacatagacatatagtgaaatgatgagggaggcagtcttggccctcatccaggtatctggtttttttttgtagaaagcacagataagtggtaaatggtctttttctgactttcattatgtggactggatggaggctttcaaactggtgccatactgctgcaggacctaaagggagccccatctttatggctgatcaactacaaccctatatgcctgaatactctgcaagaaggcctggagattttgcaaaactgatttattgagaatggcaaggagagccttgtgaacttttagctttggtgcacagctgataccaggagggaacatcctgaagtgtcagagaaaagtaaggcatatggctcacagtgatgatgccagtcagagccaggccagatggaaattgttttctgatgttactggttttcttttccctattagccaaagtgactatctcttaagagaagataatgtgacgtcaagggaagttggaaggcatggatttatatctatgtcagatcctggtttataatgttggccaaggcttatttatatatgtttatttagtattccataaaattgtacttcgtaatgaaaatgacacattttatcttaaatttagacaataaacaaaactttgttaccaaatcactc

SEQ ID NO: 17426 - DNA, 192 bp, Homo sapiens
gaatacttgtccctggaggattatcacaccccaaatgcataatctcattaatgattgaggagagaaaaggatcagattgctgttttctacaatggagcaggatattgctgaagtctcctggcatatgttaccgaatcaactggccttccagaggctaagaaatttctgttagtaaaagatgttctttttccc

SEQ ID NO: 17427 - DNA, 192 bp, Homo sapiens; identical to SEQ ID NO: 17061

SEQ ID NO: 17428 - DNA, 2952 bp, Homo sapiens
gatttttacaaattataataataggacaggacacagagctggaatattggagtttggggtataaaacactcctccctgcccccattagtatttatattgatctttcagacctactttagtaaaaaaaaccatggcccttgtttatatactgttaatccaatcattaatgcagtgtaagttatatgtgaaatgagtctttggtatttcatataggaattattttttttttcatttaaaacaaatccacatcttttgtaaaagccactgttttgaacacatttccttgaaaaatgttggtggtttttgtgattatttatttttttagatttcttttcttttgcactacaatttttggaatccttttggaaatactgtgtgactgctgtgttttgcagcatgaattatagtaaaatggtcttcaattcttaacaaatggacttccctgatgagaccaaaatggtgatttaacagtttttcttgtgtcccctaaaaagtggctctgcttcagaagtacttgccagtttttaatttatttgtgacttttcaccctaccctgctcccatataccttctaccatcagctgtcttgtttcatcatttctctgagattctgtgtgcagtgagcaatttttgtgtcagaaattctttgtcagaacaaatatatgtaacaggctcaacttactgtaaagctacttgtgttctcttcatttgtctgtaaaaatttccctaattgattatatagtgtaagaatagttgaagactagttgaagaccttttgtgatttcattatcatgcctatgcagaagaaaaatcattgaggaaaattgtcattagccagtttaactgattcaaactctgtttatttcatactaaactagtgaataagtgaaataaaggaaactcgtcattaatctaaagacagagttcaaaggaattgggccaaatatattctcagtatttggaactaatgtttttaaggtttttaggaaaatcaggtcatttaagaaattgttttgtagtttctggtttatagcagtcttcaagttttccatcttcactgtatgttgctgaaagtgaggatgaggatacagagttgatatttttagaaacagtaattttacttttaaggaaattggctagctctttgagctagagagctgtaggaagctcaacatttctttgtagagaacgttgctttttttggattgtacaggtataaaaacattgcttttgttgaattgtataggtgtaaaaagggaataactgtatgcaggtttgaaaaggaaatgtgctttaggcatgagtcataagatgccattgtacttgtaggcattttattttcctttagaaatggacatcagctcttctcttctgactggtaacacatagccccaaagcatgagattatttttcattgggtttttattgttgtttagttttggtttgttacgccagcccagtctgtctgcggaacactgactctgctctctaatgagaacaaagttagaaatctgccgataacctaaaataatttagaaatgaattaaaaatgtgaaatcgggttaaagtgatgatgataaaatagcatgcaagaaacaagctccttccatcagacttggctactgttttcttctggtacgatttggtttggaagagcctcttgtttccttctctttggggtatgtcttcgtttcttaatatgtttgtaacattattgagatataattcacataccttacaattcacttattttaagggtacaatttagtggtttttagtgtattcacaaagttgtgtaaccgtgaccacagtcaattttagaacatttcgttaccccaaaaagaaaccctgtacccttgagcagtcacctctcattttctcccagtgcccaccccatccccgagcccctggcaaccactaatctatttctctctctgtagatttgcttattctggtcatttcatataaatggaattctacaatattcggtcttttgggactggcttcccaaatatgattttctatatggagtgagaaaattcttctcatcttgagaactcttattgctgtgaaagggagtggttggtaaaatcaatagatttcaggcaagagggccagatacctaacaggtttttctccgtgaatcttatgctgagtagtttttcctcataaccaagcatttatgatatattactacttataatactgtggctagtctctagaatggatgttgaaatctttgcctcctcagtcgggaagagtcctgctaaaaatcaggctaaaaatcaggccaaaaatcaggccaaatgacttggcaaataattgacaaagtggttttcacgtgtgtctatctttgctagcagcttgtatacctcaggccaggtgagctccccaaatttcttttttcatttactccagtgagtttctgctgtctttttcaagtatgtaccataggacttaaaggtgatttggatgcgttgtaacactgctaaatatgctaagtacagaattttatctacagtactgtgagacagtcaattattgcctagggtagttcaaaaatatgatgtgagctagttaagcctttgcttgactgatttcagtgatattcagaagtgtgtaccaatcaaggctctttaaaatacggaacgactcacttaataaccagggaaccagccaaatactgtgcagccgcagaatatgcatatcaatgagttggaggtgattattctctgtaactccctaatgattgttttctaagcattgtggcttctcagtggcttgacagcatcttcctggttgtatgtggcctgtttacatgatgtattgaataatgttgtttgttgtgagcatcaatgcctgtaacaccaaactaaacacgtgtttttgggatatgtttccaatctttaaatgaccttgccctgtccaataaataaatgattgtctcaccctg

SEQ ID NO: 17429 - DNA, 682 bp, Homo sapiens
aaacaaacaaaactttggaccaaaatcccagttcaaagaaacaaaaagtggaaactattctatcataactacccaaggactactaaaaggaaaaattgtgttactttttttaaattccctgttaagttcccctccataatttttatgttcttgtgaggaaaaaagtaaaacatgtttaattttatttgactttcgcattgcttttcaacaagcaaatgttaaatgtgttaagacttgtactagtgttgtaactttccaagtaaaagtatcccctaaaggccacttcctatctgatttttcccagcaaatgaggcaggcaattctaagatcttccacaaaacatctagccatctaaaatggagagatgaatcattctacctatacaaacaagctagctattagagggtggttggggtatgctactcataagatttcagggtgtcttccaactgaaatctcaatgttctcagtacgaaaaacctgaaatcacatgcctatgtaaggaaagtgctattcacccagtaaacccaaaaaagcaaatggataatgctggccattttgcctttctgacatttccttgggaatctgcaagaacctcccctttcccttcccccaataagaccatttaagtgtgtgttaaacaactacagaatactaaataaaaagtttggccaaaaccaac

SEQ ID NO: 17430 - DNA, 2476 bp, Homo sapiens
ccatcactgtgccactgggtggagtgtgccttcagggcatcttgaaatgtcccgctgaatgatttgactcagtttgctcacttctttggcttttgttttgtgtttgagtctctctctctctctccctctctcttctctttctctccccgctgtgtgcatatgtgtgtgcgtgcacgtgcgcgcttgggcatttgctgttgtttggttattggttggttgttcattttttttttcaacaggtgaaaaagcaggaagtggtggtagagatggcctcagagtcttttccattcagtaagaaagagaaagggaatgcaggccagttacttaaaaggtcttcagattgccttcagttcacagtgcctctgcaacagccattgccctcaggtcacattctttgggctggctgcccttgcaaagcagctggccaaggcttattaaatgtgaacccaacttttccccagggctttcctgtacctgcaagcctcttagtacttaatttaccgaaggcaaatcttccagactatggcttgagtaggatgaaagacaaacacatctgcccaatgatccagctgcccttccttagaccatcacatgcctcccctcaatcacaggttttaaaattactgccctatgttgtctataagaccaagaaaactgtagtacccttattccttttgtgtcatgtaaattgtaactcaggggggcagaagctctggtcacccacaccaacaccaaatccatcagcaaattctactggacaatcctcccttttagtagcagagttgaccgccttttcccattgcatgataggtttctttccctcattctgcctagtgtgtaagttttctatttccccagtacttttagccaaccttaccaagtggtgtgtaaactagtatgtatgtgctttgcttactttttaaaaaaatgtagttagactgtgaggagttactttatgtacgttgcatattcaaactgtgatgttttatccttcaaaacaatctgcattaagaagatattgtgccctactagacagctttcattcactttattactctctcatatatgctgtgagaagttgtaatattaattggcctctttgggtgggactctaagcagtatttgcagaaatatgcttctggtccaacttgtacatccagaacaaaagggcccctctagtagctgtgtgctggattattcaggactgattaactcaagttgctcattgaatcacatcatccactttatcccagaaactagaactgtgagaaaccaggtttagaagacagtcacagaacagcacacatccaaattcagcgccattgaaagttggcctaaggctcagtgccactcacccctccctccccaaaagacaagagaaatttggccagatggggaaggtcactggaaattgaggccaaagggctgatcagaattgcctttataatatatttgatggatgcctataaatgtgggttttgcaaatattgtttaaaaaccaaacttgaagccaggcatggtggcccacacctgtggtcccagctactcaggaggctgaggtgggaggatcatttgagcccaggaggtcaaggctgcagtgagctgtgatgacaccactgcactccaacctaggtaacagagagacacctctgtctctgaaaaaacaaaacttgaagtttgaaacccccagcttgctgaggagccctttttatttttggtactgagagtctcaaggtcccatagctacatggtacagggctgttgtctgcttgctgcacagcagaaattacaccatccacaggaaatggactatttttgcagtccaacatcagccaaccacacacagccgtgtttggaagctgaagagtaaagaaatttctaggaatggctgttgttctgttttttagcacagccatttagatataacatccttcacttaaaaattaaaaacatcagtactaccaccaccaccaacaacatcaacacagatcttcacatctgcccattctgtggttagtcaatggcttgcaataaatgtgcaaactgcatctataggaaacatttttgtgattacggaatactttagttgattgctgaaaatattgaaaggtcttcattttacagtgatgagtacatatgcatgtttcggggacttggcccttctgatgaggggccctcggtactctggataacgaagcttgtgcagagtggtaaccatgcttacacactaaactataatataaaggaaatgaagccatgttaatctgagagcagtgtcgccatagttgtgttgtttacaatactctataaatgggttcctgttgccctgtaattaaactgctgcccgtagaggcctttcagttccttttctgtccttccccttcttaacacaagctcaaattttctaacttgtttttattttgaagacttttaaaatggacattttcaatacataaaaataaacagtgctttataa

SEQ ID NO: 17431 - DNA, 1275 bp, Homo sapiens
ccagtgagggcaaaagaagggctctgtaacagaaccttacctccaggtgctgttgaattcttctagcagtccttcacccaaaagttcaaatttgtcagtgacatttaccaaacaaacaggcagagttcactattctatctgccattagaccttcttatcatccatactaaagccccattatttagattgagcttgtgcataagaatgccaagcattttagtgaactaaatctgagagaaggactgccaaattttctcatgatctcacctatactttggggatgataatccaaaagtatttcacagcactaatgctgatcaaaatttgctctcccaccaagaaaatgtaaaagaccacaattgttcttcaaaaacaaacaaaacaaaacaaaacaaaattaactgcttaaatgttttgtcggggcaaacaaaattatgtgaattgtgttgttttcttggcttgatgttttctatctacgcttgattcacatgtactcttttctttggcatagtgcaactttatgatttctgaaattcaatggttctattgactttttgcgtcacttaatccaaatcaaccaaattcagggttgaatctgaattggcttctcaggctcaaggtaacagtgttcttgtggtttgaccaattgtttttctttctttttttttttttttagatttgtggtattctggtcaagttattgtgctgtactttgtgcgtagaaattgagttgtattgtcaaccccagtcagtaaagagaacttcaaaaaattatcctcaagtgtagatttctcttaattccatttgtgtatcatgttaaactattgttgtggcttcttgtgtaaagacaggaactgtggaactgtgatgttgtcttttgtgttgttaaaataagaaatgtcttatctgtatatgtatgagtcttcctgtcattgtatttggcacatgaatattgtgtacaaggaattgttaagactggttttccctcaacaacatatattatacttgctactggaaaagtgtttaagacttagctaggtttccatttagatcttcatatctgttgcatggaagaaagttgggttcttggcatagagttgcatgatatgtaagattttgtgcattcataattgttaaaaatctgtgttccaaaagtggacatagcatgtacaggcagttttctgtcctgtgcacaaaaagtttaaaaaagttgtttaatatttgttgttgtatacccaaatacgcaccgaataaactctttatattcattcaaag

SEQ ID NO: 17432 - DNA, 700 bp, Homo sapiens
tgaagctactatgtcaaatggcaagtagctctttcctgcctgcttctcagctcatttggaaaaatactgcgcaaaagacattgagctcaaatgatgcagatgttgttttcaggttaatggacacgcaaagaaaccacagcacatacttcttttctttcatttaataaagcttttaattatggtacgctgtctttttaaaatcatgtatttaatgtgtcagatattgtgcttgaaagattctcatctcagaatacttttggacttgaaaattatttcttctctactttgtaaccaaatgcaatcggtgtgccttggattatttagtttattaatgaattaagtcaaaattacggctgcaaaatggctaaggtcaagtaaagcacaacattatgatttaatatgcttttgttgaaaccacagcttttgtgcccattgttttaacttgtgtgaaacaatacaaagcccagaaattcttttcggggcatgagtaaattttgttcagggctactgtctgtatgtgcccagataaaattttcatgagagtagtttacaaaagccgtatttaaaagttaatattttcacactttttttctggatttctgcttataattaatgtaacttaaattagttgtgctctgctattttctgtatatttcatgttgtaattctttttttcaaataaaaattaattcttcaggtt

SEQ ID NO: 17433 - DNA, 2616 bp, Homo sapiens
aatccgaatcttgaactgcctatgttattgtcctacaagcatactgacagtggttacagctaaaaaagaaagcatgaagaaacaactacaaaaagttatcatctcaggatacttgatacgcaacacactaaaccactctcatgtctagagttcacaataaatgttcattaaaataccaaatgattctcttaagcatttaccattattgtaagtagcctttatggccaaagctgtaagttaagaattatatgaaagttgaaagcaagaatacttagaattctggctttagttagagtaatataactcaaatgggtgctcttttaacccatgaactttgtgaatggatttaaatacaatagtatgaagtagaagttatgcaatgagaatgaatagattttgctaatactactttttttgcctggcagaagaaatagactatttggatcacatttctcattcctcctaaatgatcatcttaattttttttcccaagtacataaggaatacttgaaaatacagaataactaaatagtatcaatgcatcagacagaatagttaatcccttctgtttacccatgtgctactaatgtcttggtagaatattcttgccaaaaaaataccttgaacgcttatgtggaaagtgttaacttacgggtatttttgtgggaatagaaaaaaattgtttattttttattcttctgaattaaaccccacttatgggtgtaagcctactagacttgaaaataaagtataaaacatttccaatcacttagtagcccctcaaagtagttagaaaataaacagatttttccagtgttgattttactgggatctgcagtaaggtggtttaaaccatagttatataaaaataaaggtcattctgaatatcagccttttataattttatgtgaagaggaagaaatatagcttattttaaacttttgacggtttttatttgaaagagattgcatttatgcatatatgcagtgctttttcttaaacttggccaatttggaaagggggaaggagccaccccaaaacggtggttcagcttgtagagccatgactctgtgaagatgaatgttgtctcttaacttggacagggaaatggtctaactctaaaccatgtaactgaccttagtaaagtccttgactaactgaactagaaggaaggtttagccttctaattagttcacttgaaacataaatgtgaaatgtcttcattcaatgttaaacacatacttttttggatataaatgaccatatttatttgactgctagtttttttgttttttttttgtctttctggcatgcctgtactattattaatgtttatattgtaccttgatttggaaaagtattggagttaatctgtattatatttatatagtccatatggcacatttgattcttccacatatattttgtgttaatgtttaggtatgatttttttctaaattctagaaaagaacataatttcagttatcagaagccattccatcattatagaccctttttcattatttcatttgctctcatatatcagtattatttttgagcattttgttacatgtcattcacaacttacctaagtgtgctgtgttctggtagcccgtatttgaggtaagctgctgaaaacaaaagtctctatattctttgcctattccaaagagctaaaaaagtctaacccaggaaagcttttgatattttgtgtttgttttcttgttcttatggttgttgttgctgtattatgattgctgttttacataaaatctatgggaactgtgaatacagacaagagagccacagtagagaggcttgtttaatgcagtaccattggagagttaacagaataatctagtagaaaaataactggttgcatgtaaaattccttccagccagaaagaaagaaagacaaggagtaagggggatttagagttatgtctcagctacacattacattgtgatactgcagctcaaattcagaatggcaatgatacatgatatcatggcctagatccttgagagggacctggctttcctttttaaaagatattttactgaagagctaaaaactggccagtgtggggttagcagatcgaataacttgaaatagaccatgcagtattcctagcactcaatgtaatcaccctatttgtgacagagaaagggaaaaaaatataataagatcatctacctataatttgaataattttgagctatcaaaatgtctttgtaattttcacaaccgctgtccattgtttgaggatgttacctactaaactgaaaacattcattccatatctacttacacatacaccagcaacagtataaatgtaagcctaactttgcaaaattcgtaataatttagtgatggaattttttaataacatgcagtatataaatgtgcagattttatgcgtgttgacaaaatcatttttcagcttgcaaaatgggactgcaatattacatttttcacttaagcagttttttacatctacgttgttgctttctaaaatgaatgtgaatgccatcttttatgactgcaacttgccttttccattacagaaatttttgtttgatgtaatcaataaactttggtatgatatgattgat

SEQ ID NO: 17434 - DNA, 170 bp, Homo sapiens
gagctcaacaaaaataaaatccaagtgtgaaagagcaaacttataccaactattttatgctcatcatcccttaagaaaccagtagagggaaaaatcactatcaagatcacccatatctgtcttggaggcgatttattttaaaaatatcaataaaatgcatgacataaatt

SEQ ID NO: 17435 - DNA, 733 bp, Homo sapiens
gcaccggcctgcgctcgtccacccttgttccccacccccacccccactcccgccccgcacccccaagttgggacgccttgtttagctttgcttgcctgggactgttgccttgtaccgatgatggggagggctgaaagttttgctgtagctgtcgggttttgtacaaaagcaaaaataagtcaggagcagcgaaaatgggacttctagagagctctcttgccccacgccgctgctcctttcacctttgtaggctgggaatcgctgtgttatttgcaaagaaaaaacagcccccactcctcctcctgagttccagggttattctgttacatttgaaaatgttgtcttgttagtttgcagttagccaaggagtgaatgggagaaacatagtatcgggtgaggccagctggagaactgcaacgcctacgcccccagtcgtgtcgcgtctgttttcctcgtggttttttggggcgctgaccgctccaagcagcgcggcagctaaagccaatgttaatttatagccaggtgtgcgtgtgtctcccgcctcgccgcccctggccgcgggacagcttctgtccaatcatgttgagttggtgatttctgccgtgatctgtttgatatttcttcgcgctaatgtgttcagatttcgtttgggtagtggggaggggctactttgtttcagggttttcaagcttttactcttaattcctaaatgagatcaataaattttataacc

SEQ ID NO: 17436 - DNA, 318 bp, Homo sapiens
atttttctggaagaactagatttactggaagacttggatttggtggaagacacagatttttctggaagacatggattagctggaagatctgtatttgatggaagaccttgaaattattggaagacatggatttcctggaagacgtggattttcctggaagatctggatttggtggaagaccagtaattgctggaagactggatttgctggaagacttgatttactggaagacttggagcttcttggaagacatggattgtccggaagacatggattgtctggaagatgtggattttctggaagctcaggattatctgg

SEQ ID NO: 17437 - DNA, 825 bp, Homo sapiens
gccctcgaccctcgggcctcgggggggagggccctgcacgccgccaccccctccccgcagccctcaccccgccaggagccactgctctcccccttgccctccggtccccttacctacccgcgcccgtctgctctctctcttcatttctccgtagtgcttgtctttgttccaggaatagcgctccagttacctgctgctggggtcggggctggagcctcactcactcggaagtgcttggaagtgtcatctaccctggccatccccgggatccctcccctgctaatctgaactgtgtcctgaaccccagctattggccaggcccctgttacaaactgcgcagaccacccatagccctgctgctgccacctgccctgctgccaggcttacatcttcccagagaactatgctgccacttcacatccactcaccacatcccacctacagactaccacctttcgagatcaggaccaacctggaaaatgccagagttggctatgccttttcagacattgatttggacagctcaccaacccctgaaggggccgttcagcctggttagttttctacctactccgagtgtcctcccctgccccaccagattgctgcaggggcgcggtgtgcctggcagccaaattgttgacacttcttttttcctatgcactggttttacacagctgtcatttttctttcaaaattgcagcagtcccacagatgtgtgcatttggacaaatagtacttaaaaacaaaacaaacaagcactcagcccagctcctcaatactacctggaaaaagcattggcattattttcaataaatatcaagcact

SEQ ID NO: 17438 - DNA, 53 bp, Homo sapiens
caagaagctacatctctcaaccttgggcaatgaaaataaagtttgagaagctg

SEQ ID NO: 17439 - DNA, 53 bp, Homo sapiens
caagaagctacatctctcaaccttgggcaatgacaataaagtttgagaagctg

SEQ ID NO: 17440 - DNA, 522 bp, Homo sapiens
agtctaggatagtttcttccccttgtgtttgaacagggcagtttaggttctaggtagtggagggccaggtggggctcgaggaacgtagtgttctttgcatttctgtcccatatgggtgatgtagagatttacctgtttttcagtattttctaaatgcttttcctttgaatagcaggtagttagcttcagagtgttaatttatgaatattagtcgcacatgtattgctctttatctggtttaagagtaacagtttgatattttgttaaaaaaatggaaataccttctcccttattttgtgatctgtaacagggtagtgtggtattgtaataggcatttttttttttttttacaatgtgcaataactcagcagttaaatagtggaacaaaattgaagggtggtcagtagtttcatttccttgtcctgcttattcttttgttcttgaaaattatatatacctggctttgcttagcttgttgaagaaagtagcagaaattaaatcttaataaaagaaagccccact

SEQ ID NO: 17441 - DNA, 79 bp, Homo sapiens
tcacacatggagaaaccaaattggacaaatcatcaccactgatggcgatgattacaataaaatcaagtttaaggagctg

SEQ ID NO: 17442 - DNA, 466 bp, Homo sapiens
gtcatgtaatcttacttcatacagaggacatttatttaatgatgaaagtgccttttgttgacttctaacttccaaatactatattatcaataggcatggaggcaggtgtttccaagggtgtctcattaactgtagctgcaaagatgtgtcaagtagaagagaatttgtttaatagattttactacataaaacctatactgtggagtcctgtggggatactgcaaactctattgccaaagggatgctttatacacataatactgaatttaacctcaagaggcaaatctgttttgtaccccaatgcaaaaccttcgtctctttgtgctttgtaaagcaaactcaagaaaactggtacacctgtaccagctgggtcctttatcttgcacgtagattaagttggtggaactggaataatccttttgatttgtggcattgtaacaactccgtgtaaagattatctgaaaag

SEQ ID NO: 17443 - DNA, 79 bp, Homo sapiens
tcaaacatggagaaaccaaattggacaaatcctcactaccaatggcgatgattacaataaaatcaagtttgaggagctg

SEQ ID NO: 17444 - DNA, 3975 bp, Homo sapiens
gttttgccaaccatggatggcaaatgtgatgtgctcccttccagctggtgagaggaggagttagagctggtcgttttgtgattacccataatattggaagcagcctgagggctagttaatccaaacatgcatcaacaatttggcctgagaatatgtaacagccaaaccttttcgtttagtctttattaaaatttataattggtaattggaccagttttttttttaatttccctctttttaaaacagttacggcttatttactgaataaatacaaagcaaacaaactcaagttatgtcatacctttggatacgaagaccatacataataaccaaacataacattatacacaaagaatactttcattatttgtggaatttagtgcatttcaaaaagtaatcatatatcaaactaggcaccacactaagttcctgattattttgtttataatttaataatatatcttatgagccctatatattcaaaatattatgttaacatgtaatccatgtttctttttcaaatctaaagttaaaaaaaaatagcagaagccagtgtcttaaagtctatcttttgtttctaagaccatgggatttcataatctcaagataaaatatgtatgaagtaattaatgtagaatttttacaccaaataataaataatgcttaataaactagagatatgagatgtgtaggaaatttggttaaacttttttcagatactttctggcccaaataataatttgttagcaaataatatgacccttgaactcaatggccatctattaaaagactgttgttcacactggaaaacatttaaagatgtgactatatccatgggtggattgaatcactcaaaatatattagtatccttctttagggatggttggttacagacatgtatttattcaggaggcagaaaatattccattttaattgcttattaaagaaaacattaaattctaaattattttgaggactgtgaagacttttcattagtgtaatattaggtcattgtcaatctcccagaatgtagttctatattctctaaatatgaaagtatccagaaaggccagtggtagtaaaaagcttagtgtatataatctcaaaagggatggaatatttacaactcatatttataacatgttgaatcttctcagttatcagtagtcatcagaagtgtcaatagctttctaaataaatattaaatatctactgtcctgtagtgaaggagtaatttttagtaattttctctttacaaagtctccagtgtttccaggtaaatatttgtgaaacaaaatacagcaaactacattgttacttcagtgtattgttgccaaaaatgacaagatattatattaaaatcagtaaattttagacagattttaaaaattaattagcctacaatagaggttatatggtaacacggtgatcttctaagcagttaagtgactgactgttctggcaacaacgacttctccgtgactgaagggccctgttcatttcctgatcctgaagctcgtctctcttttgagcctccgcttgctttggtcgatggtttccctcagctttttctttgctgttcttcatcctcgttgttgctgtcatcatgttcactgtggcttttacaatacagcctgtaaattccttatgacatagttcagtgcatttggctttattgcctgctccacagttctttacctttacttggcttagagaaactgtatctttgttgcttcatataacctttccccaaccccactaagctggacataacttattagtggtcctcccgtcactttatttgtagaaatctctctttcacatgagcaggggttctttcatgtggtttagctgacagcagaactagtgattctagacattttgcatggccctcattcagtggctcacaaacatgagggagcatcagaactacttgaggggcttgttaaaacccagtgcgttagaagtcggatgcggtggctcacacctgtaatcccagcactttgggaggcccaggcaggcggatcacttgaggttaggagttcaagaccagcctggccaacatggtgaaaccccgtctctactaaaaatacaaaagttagccgggtgtggtggtgcatgcctgtaatcccagcttcttgggaggccaaggcacaagaatcgcttgaaccaggagacggaggtttcagtgaatgaagatcgtgccattgtattccagcctcggcaacacagcaggactgtgattttctttggagactcctagattttctgtggttttgaactgaatttgttggatgttggcaagtgcctcttatgagctgtttctttatcctgcatttgccccacaaagacttatctggaggtgagcaaagtatgtttggtagtgaggtcacaaaggcaatcagccccttcctccccactcccattgccatcttctcagtccttctccctttctttccaagtagtttacccacccctcctctttcctcccctgtccctaaaataatccacgtgtcttcctaaaatctctctttgatcctgtcctttgataacaccgtcagtgcctactactgggtctagacagacctctgttgagcagtcagagtcttccctgactccacaatgcccctttccttggctgaccagtatgactactggtccccacctttcccttgcctatccctacctccctcctactaggttgtcccatccctctcttcacccattcattcatgaccatttttcactaccaagctccccccctcccgaaggaggctgaggtttttgtgactctctagactctattgtgggatggaatgaacattgctaaagaatcttgtgttcgctttactttaaaaaggtatttttttcctaattataaaactgatgtgtcagttacggaaaaattagaaatgcagcacaaatacatgaatattttaccacaaaattgccatataatatcttgtcttttttgggggtgtgaattttttgcattgttctggtcatattctttatcatgtaatttatgttcttttttactaagtattatgtgtggttattatagattttcacaaagatatattgctggtaatatattttattgtgtagtcttataatttacttaaccttctttcaattgttagaaatttaggctatttccagattttcagtattgtaaataatgctgtgatgaccaattttgtgaataaaatgtttttatgtatttcagattattcccttaggatagtctctcagtgccaagttgtcaaaaacatctctattttgcttatcttcctgctctcttgctgccttagggggtagtaaactgaaacataaagtaaacatgcatacaaataaaaaacataaaacaaaaataagcaacctgatggtaataggtgaaagtggtaacctgttttaactttgaattcttgccgggcgcggtgctcacgcctgtaatcccagcactttgggaggctgaggcgggtggatcacgaggtcaggagttcaagaccagcctggccaagatggtgaaatcccgtctctactaaaaatacaaaaattagccgggcgtggtggtgggcgcctgtaatcccagctacttgggaggctgaggcagagaattgcttgaacccaggaggcggaggttgcagtgagccaagatcgtgccactgcactccagcctgggtgacagagcgagactccgtctcaaataaaaaacaacaaaaaacaaaaaaaacttaaaattctttgcttgttagtgaccttgatcatggttctctttgtacgatagttgggcatctgtatttccacttgtgtgaatttgcctttaaattttggttatgggtttcaccttttaaaataatcaaacatatttatcttttcctgtgtgataggtttttttctgtatcttttcctgttaaacacacagacccctccccaatctggacattgaataaatattcattttcctttgc

SEQ ID NO: 17445 - DNA, 155 bp, Homo sapiens
ttttgaataaagcagcattcagttgaaataaccctttctgtggtaattccaagtgaatatttttcttctaggtgatgagtttctacttcctctggtttttacaacaggaaatgaaatggtatctaaaataaacaagctgtggtatgatgattatt

SEQ ID NO: 17446 - DNA, 1456 bp, Homo sapiens
atgccacttccggggacagagcttaagtggactgggacgcactctctccgccttcctctgccccctcgttcaccccgcagaccagaaccagtactggagctgggtctccaggtacgtccatctcatgccttgtttgcatccagcgcctatcagccactcaccacgacgggacgcggaagtggcaggtgacgggggtgtgtgccagcagatgcggatgccaggaagagtgtgagaacaggggtgggattaccgtctgtctgggaggggctccaggtacccctcttccccgtcagacccactgggagatggctgcttgccaggcccccagaaggaacatctgtctatacggtgctgaaatcccaatcaaaagtattgtttagaaatgtatttctccacagggctgacctcctgcagctcgctgagcactcccaggtcctcagcactcccaggtcgtggctggggcagtcagtaggaactgtaactatgtctctgatgcaccacgtgtttagacacagcacagtccttttttctgttcctactgtggaagtagtttctctttgggcatgctgacagcagtttttcatagcctcacggatgagccctttctacgggagtgactccatgcttgtatacagagtatttatacaaatgttttagcatcttcatatgcggtgttaacccctagttctgtacagcatattctgttcaagtatttttttacaagcttgtgctgtaggcacatgccttctgctgcagaagtggacgcccgtggcacactccccccccccccccgtggggtgccacgccttcatgggacattgccacttctgccctggaactcgtgcaggtacgtagtagctgctactgccacaacggcaacaccaagcaagagatggtccatgcttttctgacgttctcagaatagtggctagcttcaaacctgacaagcgctgcttgaagccggaacactagagaatgttgctgagagcagaaacggccacgcgggtcacgactatgcgtgggaaagtctcaagcttccctcctgccagcaacaagaaggctttggagtaggcatgatgttttcacgtgtgcgtgccgtttctccaagcactgcaggttccaccgtgtgtcagaggctgcaagtttaacatcctcctgcctgaaaacaaataggtcctttgctgaaaagagggtaaaaaaagagctttgatcttctcagccaggagaagagggtggtgttttcacgcgggcaactgctcgccggcctacatggggttaattcaagtctgctgcgagcacgactccgcccttggcactggcctccagcaagccctgttctctttggggtacaggggaacgggatggtttagactttcctgctcagtgtgtaaaaaatgtagctaaagccactatttttgctctccttaagctgttcaataaaccggttcctcatttt

SEQ ID NO: 17447 - DNA, 490 bp, Homo sapiens
gcatgagatgcaaccagggccagcgggcagggaaatgggccaatgcatgcttcagggccacacccagcagtttccctgtcctgtgtgaaatcaggcccattcttccctctgtgtttgatgagagaagtcagtgttctcagtagtagaaggcacagtgaatggaagggaacacattgtatactgcctttaggtttctcttccatcgggtgacttggagatttctttttgtttccttttggtaattttcaaatattgttcctgtaataaaagttttagttagcttcaacatctaagtgtatggatgatactgaccacacatgttgttttgcttatccatttcaagtgcaagtgtttgccattttgtaaaacattttgggaaatcttccatcttgctgtgatttgcaataggtattttcttggagaatgtaagaacttaacaataaagctgaactggtgttgtgaaacagagaaataaaaggagaaggtcatt

SEQ ID NO: 17448 - DNA, 346 bp, Homo sapiens
caagtgtgggctcctgaaaggaatgttccagagaaaccagctaaatcatggcaccttcaatttgccatcgtgacgcagacctgtataaattaggttaaagatgaatttccactgctttggagagtcccacccactaagcactgtgcatgtaaacaggttcctttgctcagatgaaggaagtagggggtggggctttccttgtgtgatgcctccttaggcacacaggcaatgtctcaagtactttgaccttagggtagaaggcaaagctgccagtaaatgtctcagcattgctgctaattttggtcctgctagtttctggattgtacaaataaatgtgttgtagatg

SEQ ID NO: 17449 - DNA, 2697 bp, Homo sapiens
gggccctgtccagctgcaggcatgcacaatggtgccaccgcttgtcacccggctccccccaccccttcatttggacccgcagctgctgtgctgctctgtgccatcggctccttgttggtctgagtttcccggatgagctctgggtgtttgtgagtttggtttctctgccctgccccaagcgtgctgagacttggtgccgaaattcaagagccagctctgatagaaagccagcaccagcctcgggagctgctgagccaccaactcccaaagccagcctgcctccagctttactgagcacaggatgcgggggccaagatgatgctgaggcctgatgacatttatgcttaggggacaagagtttgaactcaagggactgtgacccctgcacactggagtggctcattgtggcaggtttctgccaatagacagcccctgacagtggcctcaaggagctgcaggtggggggctcagcctgcacccacttggagcccctgcaaggagcgaaccggtcagcaccaagtaacaccacacacacgcagcacccaggatgatggtttcacttcagtcttccccatcccaggttttatgttgctgggcttccggagagccggtccaagcggaggctttcagtgatttaagtacaaacatgcatctcgtgatagtcctgccttgagagcttaggaatcttccggataagtatgaagcaattcgtaggcctgtttcccatctgattccatagggggctgggtgtggccttcgggttgacatgagaaaggtctttagcaatcatttctgcaccggagatgagttttatcctgtgttggggagaggtgctcaccctccaccctgtgtccctgttttggtagcaagagtgaccgatgtcaagaacgagcatcaaagccagaatcctgcttgtttgcttaaaaatgtaattgggggcggcgggggaggagaggggaaagagacattcgcttggtttagtgaaacgcaggtgactttgtagctctgtggtcagcctacttgtctgctctgagggagagtgcgtggggagccatgctcaccgtggcaaacacaggaaccccatgactcgcccctcacctggcgtggagctgcctggtttgggctggagcagagctggtttcctggaatgttcctttggcccacatatggttctgtcccggtgagctctgttgtcagaggctcacgggacagaaccacatgctagggtctagggcccctgtctactgatagtcagtttgctgtgtcagaaagcacttctgaaagcagatatgagtcaccagacaggcaggatcttacaaaactcacgggcctctttggtctgcatgatggccccatgcgtttcataggctgtccactgagcgggattgtctgctgagtgggatgagccaactccagtttcttaaggaaaccactggaatctgcagcccccacatgcatctgtctaacgcatgcctcgtgttcgttttgcaaacatgcctgtggtggagggtggtcagttgtagccctgtgcgtctcaaggctgccttgtgaggccattcccagtgcgtgcccttgagctccttaccaccccttttcctgctcggccctttaatccctgacagacctggactgtgtggctgaagggggacctgcagcactgcagaaatgcctctgcgtggtgccatgaaggaaagaaaccttggcctggtctcgagaagcttcccatgcttcaggaagttagtaagggtggggtggcttgcaggattggcctgtttccagggcctcccacactcattggccagattgtgaactttgtcaggcttgtccctccctgataccaagtatgtcgagaaccgatggccccaccctctggctggtgctgggccggaggtggctatggaggattttggcatgcgtggcctgtcgccacctggacagcgtgacctcaggggttgtccactttacctttatggtgaggcctgtcggatggctaagtccttgaaaccctagagctgtgacgtagaatatgtgctgtctgtgagaccgtgttcccaggagcactgactgcagttgagagagacccattttgctctcccttaccgccccccgccccgggtgctttctgcacaaagcctagagcctggcactcaagcccaccggtggcagctcctagtgactggacatgcctggaagacccctcagccttctgtttgcagaacgttcatttcaggagcttctccttcccacagacatcttacacttgctcgacactgccacctgcagaagcctggcgggctctggtcaccatgtgtctatctgaaggttgcactggccagcatgggcctgtcccaagcgagaggggagacacagtggactgaaaggactggttgaaagtggccaatctctatcagcttaatttggcagagaaaatttgtaacaactctgagcacatgctgggtgaagtcacagctcaaggaaagataaagctgggcggaaggaggtgtgcgtggcttctggggtgggacccagaggggaggctctgggacaggggctggggttcagtgccagggccctgaggaagaaatggggactgatctcaaaattccagaattccctgtacatctgttcacgtgcttgtgtccaggtgtgacttgtaaactgtctagtgtttgcattaaataaaatggcaccgagcag

SEQ ID NO: 17450 - DNA, 1576 bp, Homo sapiens
gtaccagctggtaccctgtggggcaacctctccagttccccaggaggtccaagccccttgccaagggagttgggggaaagcagcagcagcagcaggagcgactagagtttttcctgccccattccccaaacagaagcttgcagagggtttgtctttgctgcccctctcccctacctggcccattcactgagtcttctcagcagaccatttcaaattattaataaatgggccacctccctcttcttcaaggagcatccgtgatgctcagtgttcaaaaccacagccacttagtgatcagctccctaaaaccatgcctaagtacaggcggattagctatcttccaacaatgctgaccaccagacaattactgcatttttccagaagcccactattgcctttgtagtgctttcggcccagttctggcctcagcctcaaagtgcaccgactagttgcttgcctatacctggcacctcattaagatgctgggcagcagtataacaggaggaagagatccctctcctttggtcagattattatgttctcagttctctctccctgctacccctttctctgcagatagatagacactggcattatccctttaggaagaggggggggcagcaagagagcctatttgggacagcattcctctctctctgctgctgtgacatctccctctccttgctggctccatctttcgtctgcactaccaattcaatgcccttcatccaatgggtatctatttttgtgtgtgattatagtaactactccctgctttatatgccaccctcttccttctctttgacccctgtgactctttctgtaactttcccagtgacttcccctagccctgacccaggcactaggccttggtgacttcctggggccaagaaactaaggaaactcggctttgcaacaggcattactcgccattgattggtgcccacccagggcacactgtcggagttctatcacttgcttgacccctggacccataaaccagtccactgttatacccggggcactctaaccatcacaatcaatcaatcaaattcccttaaatttgtatggcactggaactttggcaaagcacttttgacaagttgtgtctgattggagcttcatgatagccttgtgacatctttagggcaggattcttatccccattttgcagatgaaaaccctgagtcacagatttctgtgggactgtggatctcactggaagctatccaagagcccactgtcaccttctagaccacatgatagggctagacagctcagttcaccatgattctcttctgtcacctctgctggcacaccagtggcaaggcccagaatggcgacctctctttagctcaatttctgggcctgaggtgctcagactgcccccaagatcaaatctctcctggctgtagtaacccagtggaatgaatttggacatgccccaatgcttctatatgctaagtgaaatctgtgtctgtaatttgttggggggtggatagggtggggtctccatctactttttgtcaccatcatctgaaatggggaaatatgtaaataaatatatcagcaaagc

SEQ ID NO: 17451 - DNA, 1109 bp, Homo sapiens
gtcaaggagccggtcacaaaggcagaaatgctggagagagtcatcaaaaattacaagcgctgctttcctgtgatcttcggcaaagcctccgagtccttgcagctggtctttggcattgacgtgaaggaagcggaccccaccagcaacacctacacccttgtcacctgcctgggactcctatgatggcctggtggttgataataatcagatcatgcccaagacgggcctcctgataatcgtcttgggcatgattgcaatggagggcaaatgcgtccctgaggagaaaatctgggaggagctgagtgtgatgaaggtgtatgttgggagggagcacagtgtctgtggggagcccaggaagctgctcacccaagatttggtgcaggaaaactacctggagtaccggcaggtgcccagcagtgatcccatatgctatgagttactgtggggtccaagggcactcgctgcttgaaagtactggagcacgtggtcagggtcaatgcaagagttctcatttcctacccatccctgcatgaagcagctttgagagaggaggaagagggagtctgagcatgagctgcagccagggccactgcgaggggggctgggccagtgcaccttccagggctccgtccactagtttcccctgccttaatgtgacatgaggcccattcttctctctttgaagagagcagtcaacattcttagtagtgggtttctgttctattggatgactttgagatttgtctttgtttccttttggaattgttcaaatgttccttttaatgggtggttgaatgaacttcagcattcaaatttatgaatgacagtagtcacacatagtgctgtttatatagtttaggagtaagagtcttgttttttattcagattgggaaatccattccattttgtgaattgggacatagttacagcagtggaataagtattcatttagaaatgtgaatgagcagtaaaactgatgacataaagaaattaaaagatatttaattcttgccttatactcagtctactcggtaaaattttttttaaaaaatgtgcatacctggatttccttggcttctttgagaatgtaagacaaattaaatctgaat

SEQ ID NO: 17452 - DNA, 76 bp, Homo sapiens
agtaagacagattcttcactgtgttttaaaaggcaagtcaaataccacatgattttactcatatgtggaatctaaa

SEQ ID NO: 17453 - DNA, 168 bp, Homo sapiens
atagtggtggcagtgcagcaaccagagcactgtataccccgtgaagcatccaggcacccaaaccccggggctccccttcgcgtatttcaggattctcctttttacccctctaccaagctgtgaccctcaattcatatttatgaatctctacgcaaaaaataactacag

SEQ ID NO: 17454 - DNA, 557 bp, Homo sapiens
gtctgagcacgagttgcagccagggccagtgggagggggtctgggccagtgcaccttccaaggccccatccattagtttccactgcctcgtgtgatatgaggcccattcttcactctttgaagagagcagtcagtattgttagtagtgagtttctgttctattggatgactttgagatttatctttgtttcctgttggaattgttcaaatgttccttttaacggatggttgaatgaacttcagcatccaagtttatgaatgacagtagtcacacatagtgctgtttatatagtttaggagtaagagtgttgttttttattcagattgggaaatccattccattttgtgaattgtgacaaataacagcagtggaaaaagtatgtgcttagaattgtgaaagaattagcagtaaaatacatgagataaagacctcaagaagttaaaagatacttaattcttgccttatacctcactctattctgtaaatttgaaaaaaaagcatggatacctggatatccttggcttctttgagaatttaagagaaattaaatctgaat

SEQ ID NO: 17455 - DNA, 559 bp, Homo sapiens
gcatgagttgcagccaaggccagtgggagggggactgggccagtgcaccttccagggccgcgtccagcagcttcccctgcctcgtgtgacatgaggcccattcttcactctgaagagagcggtcagtgttctcagtagtaggtttctgttctattgggtgacttggagatttatctttgttctcttttggaattgttcaaatgtttttttttaagggatggttgaatgaacttcagcatccaagtttatgaatgacagcagtcacacagttctgtgtatatagtttaagggtaagagtcttgtgttttattcagattgggaaatccattctattttgtgaattgggataataacagcagtggaataagtacttagaaatgtgaaaaatgagcagtaaaatagatgagataaagaactaaagaaattaagagatagtcaattcttgccttatacctcagtctattctgtaaaatttttaaagatatatgcatacctggatttccttggcttctttgagaatgtaagagaaattaaatctgaataaagaattcttcctgtt

SEQ ID NO: 17456 - DNA, 569 bp, Homo sapiens
gtctgagcacgagttgcagccagggccagtgggagggggtctgggccagtgcaccttccggggccgcatcccttagtttccactgcctcctgtgacgtgaggcccattcttcactctttgaagcgagcagtcagcattcttagtagtgggtttctgttctgttggatgactttgagattattctttgtttcctgttggagttgttcaaatgttccttttaacggatggttgaatgagcgtcagcatccaggtttatgaatgacagtagtcacacatagtgctgtttatatagtttaggagtaagagtcttgttttttactcaaattgggaaatccattccattttgtgaattgtgacataataatagcagtggtaaaagtatttgcttaaaattgtgagcgaattagcaataacatacatgagataactcaagaaatcaaaagatagttgattcttgccttgtacctcaatctattctgtaaaattaaacaaatatgcaaaccaggatttccttgacttctttgagaatgcaagcgaaattaaatctgaataaataattcttcctcttc

SEQ ID NO: 17457 - DNA, 512 bp, Homo sapiens
gatcagtgtcttctttttctactgcaagcacatgtaactagatttagtgcctgccatggtgtgaaatctggcttttgagaacacaaacttttcccccacggacctccctttatcactttaatagtgaccttgagcctattttagccgtttggaagtgttctttgatattacagttctttgtaaaatgacctgcgaattaccctaattctcaaaagcaaaacaagagcacacaagcgtgaagaaaaggatcttaaagctttgagcacctgccattttgccttgcatcgtttccctcgtcatgcatttccacatatccacaaacacagaacgactttagacaagcacatgttacacctgtgttgccacaagcagtcattcttgacggctccagtttttatttgacacttgagtttagttttctcttttataaacccagtgaactcctgcactggcatttggatgtgtgttaatgctatttgttttgtcttaaaagtaaaacctttctcagtttg

SEQ ID NO: 17458 - DNA, 1425 bp, Homo sapiens
gctcagaagaccgaagcactccttcccctggcaggcagcagggacatttgaacaaggggaaggggcagcttacactaacagggaacttgactggggcagagggacagggaagccaggtcgagatcaagcccccttactttccaccagctggaagggacttcaccaaccaagaccaaatagcatctggttcagtgggggccgggcccatagcccctaacaggtacaggagacacaagcggggaaccactacacttagcacatggggtgcctgggcttcagatggggaccccagcgaagcaggggctgaagaaggtgtggctgggggctctggcctggtcctctggacacccccaaatatctaccctgtggactttgagctgagcatgcccactggcacccaggccacgtgggacctggaggagcctgcctggggcctgcctctgccagaaggagccagggctgctgaggaagagctgtggggcagaagtgaagccccgcaggggaggccacagggtccagcctgtctttaggatcatctacactgcatgaggggagccccaggaaggcagcattcataagcccctgcaccagtgaggaagagaaagaggaggagaattaagaagaggatgatcgggaggaggaagaggagaataaggaggagcaggaggaagagggggaggagaaggaggaagagggggaggaggaagaggggaaggaggaggaagaagtgtaagaagagaagagaggatgtgttgggggtgggtagttgtttttggtttgcgtcatcatcaggcccgggctctgctcactgctgttccgtgtcaagaactccacctctgctttgccggtgtagatctcggccagtggctgcttgttctcttggggatgtgtgtgtttttatctgagcagctcctttccagagtaccccagcgcagttccaggagacggtgggaaggaggcatggcagacgctcaccttgtgactgtgacctcgactgcaggaggaccaaccagacacgggaaggagcagggctgcctgaggctccccaggaagctttgtgctttggcgttccacccctgctgttactcgtgactcagtttcctcaacttggtggggtgttccctgctatgttttccagcatcctgtgactgtcctgtgcagtctatagggcagggccctgccccagcgggtgggctcaggagggggttccctgaagcgagtacacattgccagagcccaccatcctggcaagaggtggatcctggggccctatggaaggagggatgtggtggggggggccacactgagggaggggccggggacttgtgacctgtagtggctgtttgcagtttctctctgtgttagattcccttttcttcagcagtttcagttcatgtttctcttcagtaaattttgttcagtgtt

SEQ ID NO: 17459 - DNA, 212 bp, Homo sapiens
aaagtcttcagtgatggcctacgccaaagcacaggatggggcgggcaggaagccctctcccaagatcgagttggccgaggatggatgattgtggcagcagaagccgttgcagccccacgttgtgctctaggcagggacctttggcccctttggggagggagagacagacgggcggtttgacttggacacaaagaaagccttggtttctaagc

SEQ ID NO: 17460 - DNA, 438 bp, Homo sapiens
ggtcctggcccaggcctgcccaaagagaagcccaggatggtcggctgcctggggacattgtcaccacgtcgccatgacggctggtccccacaggaccagctgggaggactggttgtgctgctggagaagggctggagaaggcaatggcatgctgccgctttgccagtccctagaagtcgcggtgcaggtgatggtgggagccgcgcctccagcgggcaggccgggagtgtactgtgtgcagctgacccaaggcagccacatctgcgtttgtcctttgagaggactttgactacaatacaggcatgacatcaatgaaaggaaagtcatgaaatcgatgagactgaatccctacggatttcttaaaagccagatttgtagggagaatgaatgtgcaacgtggctgaaatctattttgtgtaataaaaggtgatacaagtc

SEQ ID NO: 17461 - DNA, 439 bp, Homo sapiens
gggcctccttcctcccctgcctgcagctggcttccacctggcacgtgcctgctgcttcctgagagcccggcctctccctccagtacttctgtttgtgcccttctgcttcccccattcccttccacagctcatagctcgtcatctcggcccttgtccacactctccaagcacattacaggggacctgattgctacacgttcagaatgcgtttgctgtcatcctgcttggcctggccaggcctggcacagccttggcttccacgcctgagcgtggagagcacgagttagttgtagtccggcttgcggtggggctgacttcctgttggtttgagcccctttttgttttgccctctgggtgttttctttggtcccgcaggagggtgggtggagcaggtggactggagtttctcttgagggcaataaaagttgtcatggtgtgt

SEQ ID NO: 17462 - DNA, 382 bp, Homo sapiens
cccgcctcatgcactgaccacagcccccaggggaggatggtactggatctggccccatcttctggcccttagctggtgccacttccctcctgtggcaatcccagtcctgcacgtcacaggagacagcggggggtggcagggcctggtgtgtgccgagcctgcctgtgtcctacagatgcacactccggacatcgggggccagggcacaacatctgaagccatccaggacgtcatccgccacatccgcgtcatcaacggccgggccgtggaggcctaggctggccctaggaccttcttggtttgctccttggattccccttcccactccagcaccccagccagcctggtacgcagatcccagaataaagcaccttctccctag

SEQ ID NO: 17463 - DNA, 1185 bp, Homo sapiens
gctgcccgggcgggtacacggcccaggcccagggaaccccctggggccccggccctcactctcctatagagattgtgtgtgtgtgtgtgtgcgcgcgcgcgtgctcgctgtgcgcacgcacacatctcctcgtctgggtgtgcgcacagggctttgttagcagagagaagcccctgaggagaagggacgcttttcttccttctgcccaagtaaagtgaccatgccagtggccagcactgggggcacacctgtgatgggcaccccttcagctgtgcgtgtgcattccccatcccccatgctcttgcgtgtgcttgcacgtgcacgcacacacacacccagtgctctctccacccgacccgtgtacttgcagacagggaagctgagctgaaaggagcacaagagagtgtccggcttcgctgctgagcgcggcctctccccgccgctgcgcactgcagttatttgtagacaaaggcacccctgatttttgtggtttttctccctttctgtgcttgccaatagttgttttgttttgtggacctgccctgggggctggcagctccttcaggcagcctggcagaagtggaactcccctctccactgatggctgggaagggagttggggaggaagagtgggagggagggctggggatggatgggagggaaggggagggaaaggtgggaggaatgggaagcagctgttctggtggcttccactctgaggtgtgggaacggggagcctctggggggcacctgtttccccagtgactcagagagagcaagactgcaggaacggaggggtcctgcagggtgtccaccaagaagtcacagagcccgttctgcgccccacaccatctggagcaggggcttctcttctgagtgaactgaggaaggtgcttagatggtgagggctctagaaaccaagccccatgagcagcagtggaagacctcgggccatgcggcctggggaggacttggtggcgatccgcaacctggaccccagtgagaggcggtgggctgactgggaaggagaggcccccaacctcctcaggatttgcacgtgtgaactaggctgcctgtggggtgccccttaggcttggagagccccagattggaggcagacagactgcaccaccccttccccccctgcatctcaagaataaagcaagctgcctttgtacttggttg

SEQ ID NO: 17464 - DNA, 731 bp, Homo sapiens
tggagtccaggacaggagatgctgtgcccctggccttgggatccaggcccctccctctccagcaggcccatgggaggctggagttggggcagaggagaacttgctgcctcggatccccttcctaccacccggtccccactttattgccaaaacccagctgcaccccttcctgggcacacgctgctctgccccagcttgggcagatctcccacatgccaggggcctttgggtgctgttttgccagcccatttgggcagagaggctgtggtttgggggagaagaagtaggggtggcccgaaagggtctccgaaatgctgtctttcttgctccctgactgggggcagacatggtggggtctcctcaggaccagggttggcaccttccccctcccccagccactccccagccagcctggctgggactgggaacagaactcggtgtccccaccatctgctgtcttttctttgccatctctgctccaaccgggatgggagccgggcaaactggccgcgggggcaggggaggccatctggagagcccagagtccccccactcccagcatcgcactctggcagcaccgcctcttcccgccgcccagcccaccccatggccggctttcaggagctccatacacacgctgccttcggtacccaccacacaacatccaagtggcctccgtcactacctggctgcggggcgggcacacctcctcccactgcccactggccggc

SEQ ID NO: 17465 - DNA, 352 bp, Homo sapiens
ggtgccgctgctggagatgcgtgcccccggcggctacccgctggaccggccactctccccagcccccttgcttctctccagccctgtccagcaagtgcagggtgcctgcacttcaccctgtgcagagaggtgggatggggccgtgcacacagggatgcccgctccacatcctgcctgcccctcagccctggcccaggccccttttggaggcagctgaggaaggatgctggggaaagccctcttctgcagctttgtggaaggctgatcagtggctgctgggtggcgggtacccttgctcagatgcctggcagggctgggtggcgattcataaagacctcgtgttgattccccg

SEQ ID NO: 17466 - DNA, 63 bp, Homo sapiens
agcctgccccatcccctcctcaccccacgagctttcacaataaattcgctccgtggcactggg

SEQ ID NO: 17467 - DNA, 16 bp, Homo sapiens
aggctgagtccgctcc

SEQ ID NO: 17468 - DNA, 1788 bp, Homo sapiens
gaggaagctgactagcccctggattcttctccagacccccctgcttcaggaacacccgccagggcccacccctcccaccccgtcccagcattcgcacttcaccctcgcgagccgctgttcactcctctcccctttctctttctctctgtttttaaaataatctaaagaaagcacattttaccattgctgttgggaggaagcagaggcagatgggaaagcagagagaggagcgcgcttcctttcctccccgctgccgcccaccctggggagagacttttgcggggagggaaggcggagctgaggacagccagctccgccctcccaaggctgtgcgttcctgagggccaggtcgggggcaggcatggaggggaggaaaggcgtccctcttggccctccccagagtggctttcctggcaccctggcctgggtgtctggttctgttttcttttcttccccttgtgtttccagtcacctaacttcccttcctcaggctcccccggcccaccctgctcagtgaccccacaggaagcttacacattttctcagaggcctttgtgctcccacctcttctaccctccccctcttctttcccattttaaaaaagaaaagaaggaaaaagaaaaaaggggcaaggagccccgcggcggcctgggcagcgcctgtgcagacctccctgcaggccgcactgccaactgctgcatttgttgtgttttttaggttgcaattggtgaagttcacactttcattgtaattttagcgtgtggggttttgtcccttttttgttgttgttagctgtgtacagaatgtgtaatcttttttcttttctcttttttttgttttgttttgttttgtttttgtttttttacttttttcttcttggctaattcttggcagggatctttctggaggaaaagctggggccagccagggcaggagaggtgtgaaatctgccacgaggggcctgctgtttgccacccagcccaacttcctgttgctggcccctgccctctgcccttttgcctgtcctcaggccgctggaacaaaggaaggacagctcattcctcatgggcgatcactccgcatctatagggtcgagcctaggggagcttgagggagggctggggcctccttgtcctggatttccagctctccccatgccccctccctgagcaccaccggcaccgcctcccaaacagggctgctggtttccgcagccactgctccacctcccccaaatcgtcatggaaagggtggagaatggaggggaaccaggcgtccttggaggcagcttgggagggtgactgtgtagtgtcacccacaagggaggctagggcaatggagcaggccaccagcagcagctgtgcagcatggaactcaggccaggctccgaggctgggggatctgcttggagttttctgccccccaccccaaacttctgtcgaggagcaaggcttgccagcaagtcagaaggatttgaaccgagcagccaatctttccagccctcccctaccgacctctgcctggagacgcagcagcctgtgtcctccagggcctctggtttgttgtattatagtatatttcgctgtggaaaatgtcacgtttagtcaccttggagcccactcacctggtcctgttgttttaccccatcccttctctcgcgcgcctattgatttgtttctgaggagagtacaccgttcactattgtagagtaacccctgtgactcaatattaccatagtgcgatgtcgttttgtgctattttgaacaattaaaagactttttttgaaat

SEQ ID NO: 17469 - DNA, 1353 bp, Homo sapiens
tgtgttcacctgggcagatcccccaaatccggaagtcaaagttctcatggtcagaagttctcatggtgcacgagtcctcagcactctgccggcagtgggggtgggggcccatgcccgcgggggagagaaggaggtggccctgctgttctaggctctgtgggcataggcaggcagagtggaaccctgcctccatgccagcatctgggggcaaggaaggctggcatcatccagtgaggaggctggcgcatgttgggaggctgctggctgcacagacccgtgaggggaggagaggggctgctgtgcaggggtgtggagtagggagctggctcccctgagagccatgcagggcgtctgcagcccaggcctctggcagcagctctttgcccatctctttggacagtggccaccctgcacaatggggccgacgaggcctagggccctcctacctgcttacaatttggaaaagtgtggccgggtgcggtggctcacgcctgtaatcccagcactttgggaggccaaggcaggaggatcgctggagcccagtaggtcaagaccagccagggcaacatgatgagaccctgtctctgccaaaaaattttttaaactattagcctggcgtggtagcgcacgcctgtggtcccagctgctggggaggctgaagtaggaggatcatttatgcttgggaggtcgaggctgcagtgagtcatgattgtatgactgcactccagcctgggtgacagagcaagaccctgtttcaaaaagaaaaaccctgggaaaagtgaagtatggctgtaagtctcatggttcagtcctagcaagaagcgagaattctgagatcctccagaaagtcgagcagcacccacctccaacctcgggccagtgtcttcaggctttactggggacctgcgagctggcctaatgtggtggcctgcaagccaggccatccctgggcgccacagacgagctccgagccaggtcaggcttcggaggccacaagctcagcctcaggcccaggcactgattgtggcagaggggccactacccaaggtctagctaggcccaagacctagttacccagacagtgagaagcccctggaaggcagaaaagttgggagcatggcagacagggaagggaaacattttcagggaaaagacatgtatcacatgtcttcagaagcaagtcaggtttcatgtaaccgagtgtcctcttgcgtgtccaaaagtagcccagggctgtagcacaggcttcacagtgattttgtgttcagccgtgagtcacactacatgcccccgtgaagctgggcattggtgacgtccaggttgtccttgagtaataaaaacgtatgttgcaat

SEQ ID NO: 17470 - DNA, 8554 bp, Homo sapiens
ctttacacggagcggattgcaaagcaaaccaacaagaataaaggcagctgttgtctcttctccttatgggtagggctctgacaaagcttcccgattaactgaaataaaaaatatttttttttctttcagtaaacttagagtttcgtggcttcagggtgggagtagttggagcattggggatgtttttcttaccgacaagcacagtcaggttgaagacctaaccagggccagaagtagctttgcacttttctaaactaggctccttcaacaaggcttgctgcagatactactgaccagacaagctgttgaccaggcacctcccctcccgcccaaacctttcccccatgtggtcgttagagacagagcgacagagcagttgagaggacactcccgttttcggtgccatcagtgccccgtctacagctcccccagctccccccacctcccccactcccaaccacgttgggacagggaggtgtgaggcaggagagacagttggattctttagagaagatggatatgaccagtggctatggcctgtgcgatcccacccgtggtggctcaagtctggccccacaccagccccaatccaaaactggcaaggacgcttcacaggacaggaaagtggcacctgtctgctccagctctggcatggctaggaggggggagtcccttgaactactgggtgtagactggcctgaaccacaggagaggatggcccagggtgaggtggcatggtccattctcaagggacgtcctccaacgggtggcgctagaggccatggaggcagtaggacaaggtgcaggcaggctggcctggggtcaggccgggcagagcacagcggggtgagagggattcctaatcactcagagcagtctgtgacttagtggacaggggagggggcaaagggggaggagaagaaaatgttcttccagttactttccaattctcctttagggacagcttagaattatttgcactattgagtcttcatgttcccacttcaaaacaaacagatgctctgagagcaaactggcttgaattggtgacatttagtccctcaagccaccagatgtgacagtgttgagaactacctggatttgtatatatacctgcgcttgttttaaagtgggctcagcacatagggttcccacgaagctccgaaactctaagtgtttgctgcaattttataaggacttcctgattggtttctcttctccccttccatttctgccttttgttcatttcatcctttcacttctttcccttcctccatcctcctccttcctagttcatcccttctcttccaggcagccgcggtgcccaaccacacttgtcggctccagtccccagaactctgcctgccctttgtcctcctgctgccagtaccagccccaccctgttttgagccctgaggaggccttgggctctgctgagtccgacctggcctgtctgtgaagagcaagagagcagcaaggtcttgctctcctaggtagccccctcttccctggtaagaaaaagcaaaaggcatttcccaccctgaacaacgagccttttcacccttctactctagagaagtggactggaggagctgggcccgatttggtagttgaggaaagcacagaggcctcctgtggcctgccagtcatcgagtggcccaacaggggctccatgccagccgaccttgacctcactcagaagtccagagtctagcgtagtgcagcagggcagtagcggtaccaatgcagaactcccaagacccgagctgggaccagtacctgggtccccagcccttcctctgctcccccttttccctcggagttcttcttgaatggcaatgttttgcttttgctcgatgcagacagggggccagaacaccacacatttcactgtctgtctggtccatagctgtggtgtaggggcttagaggcatgggcttgctgtgggtttttaattgatcagttttcatgtgggatcccatctttttaacctctgttcaggaagtccttatctagctgcatatcttcatcatattggtatatccttttctgtgtttacagagatgtctcttatatctaaatctgtccaactgagaagtaccttatcaaagtagcaaatgagacagcagtcttatgcttccagaaacacccacaggcatgtcccatgtgagctgctgccatgaactgtcaagtgtgtgttgtcttgtgtatttcagttattgtccctggcttccttactatggtgtaatcatgaaggagtgaaacatcatagaaactgtctagcacttccttgccagtctttagtgatcaggaaccatagttgacagttccaatcagtagcttaagaaaaaaccgtgtttgtctcttctggaatggttagaagtgagggagtttgccccgttctgtttgtagagtctcatagttggactttctagcatatatgtgtccatttccttatgctgtaaaagcaagtcctgcaaccaaactcccatcagcccaatccctgatccctgatcccttccacctgctctgctgatgacccccccagcttcacttctgactcttccccaggaagggaaggggggtcagaagagagggtgagtcctccagaactcttcctccaaggacagaaggctcctgcccccatagtggcctcgaactcctggcactaccaaaggacacttatccacgagagcgcagcatccgaccaggttgtcactgagaagatgtttattttggtcagttgggtttttatgtattatacttagtcaaatgtaatgtggcttctggaatcattgtccagagctgcttccccgtcacctgggcgtcatctggtcctggtaagaggagtgcgtggcccaccaggcccccctgtcacccatgacagttcattcagggccgatggggcagtcgtggttgggaacacagcatttcaagcgtcactttatttcattcgggccccacctgcagctccctcaaagaggcagttgcccagcctctttcccttccagtttattccagagctgccagtggggcctgaggctccttagggttttctctctatttccccctttcttcctcattccctcgtctttcccaaaggcatcacgagtcagtcgcctttcagcaggcagccttggcggtttatcgccctggcaggcaggggccctgcagctctcatgctgcccctgccttggggtcaggttgacaggaggttggagggaaagccttaagctgcaggattctcaccagctgtgtccggcccagttttggggtgtgacctcaatttcaattttgtctgtacttgaacattatgaagatgggggcctctttcagtgaatttgtgaacagcagaattgaccgacagctttccagtacccatggggctaggtcattaaggccacatccacagtctcccccacccttgttccagttgttagttactacctcctctcctgacaatactgtatgtcgtcgagctccccccaggtctacccctcccggccctgcctgctggtgggcttgtcatagccagtgggattgccggtcttgacagctcagtgagctggagatacttggtcacagccaggcgctagcacagctcccttctgttgatgctgtattcccatatcaaaagacacaggggacacccagaaacgccacatcccccaatccatcagtgccaaactagccaacggccccagcttctcagctcgctggatggcggaagctgctactcgtgagcgccagtgcgggtgcagacaatcttctgttgggtggcatcattccaggcccgaagcatgaacagtgcacctgggacagggagcagccccaaattgtcacctgcttctctgcccagcttttcattgctgtgacagtgatggcgaaagagggtaataaccagacacaaactgccaagttgggtggagaaaggagtttctttagctgacagaatctctgaattttaaatcacttagtaagcggctcaagcccaggagggagcagagggatacgagcggagtcccctgcgcgggaccatctggaattggtttagcccaagtggagcctgacagccagaactctgtgtcccccgtctaaccacagctccttttccagagcattccagtcaggctctctgggctgactgggccaggggaggttacaggtaccagttctttaagaagatctttgggcatatacatttttagcctgtgtcattgccccaaatggattcctgtttcaagttcacacctgcagattctaggacctgtgtcctagacttcagggagtcagctgtttctagagttcctaccatggagtgggtctggaggacctgcccggtgggggggcagagccctgctccctccgggtcttcctactcttctctctgctctgacgggatttgttgattctctccattttggtgtctttctcttttagatattgtatcaatctttagaaaaggcatagtctacttgttataaatcgttaggatactgcctcccccagggtctaaaattacatattagaggggaaaagctgaacactgaagtcagttctcaacaatttagaaggaaaacctagaaaacatttggcagaaaattacatttcgatgtttttgaatgaatacgagcaagcttttacaacagtgctgatctaaaaatacttagcacttggcctgagatgcctggtgagcattacaggcaaggggaatctggaggtagccgacctgaggacatggcttctgaacctgtcttttgggagtggtatggaaggtggagcgttcaccagtgacctggaaggcccagcaccaccctccttcccactcttctcatcttgacagagcctgccccagcgctgacgtgtcaggaaaacacccagggaactaggaaggcacttctgcctgaggggcagcctgccttgcccactcctgctctgctcgcctcggatcagctgagccttctgagctggcctctcactgcctccccaaggccccctgcctgccctgtcaggaggcagaaggaagcaggtgtgagggcagtgcaaggagggagcacaacccccagctcccgctccgggctccgacttgtgcacaggcagagcccagaccctggaggaaatcctacctttgaattcaagaacatttggggaatttggaaatctctttgcccccaaacccccattctgtcctacctttaatcaggtcctgctcagcagtgagagcagatgaggtgaaaaggccaagaggtttggctcctgcccactgatagcccctctccccgcagtgtttgtgtgtcaagtggcaaagctgttcttcctggtgaccctgattatatccagtaacacatagactgtgcgcataggcctgctttgtctcctctatcctgggcttttgttttgctttttagttttgcttttagtttttctgtcccttttatttaacgcaccgactagacacacaaagcagttgaatttttatatatatatctgtatattgcacaattataaactcattttgcttgtggctccacacacacaaaaaaagacctgttaaaattatacctgttgcttaattacaatatttctgataaccatagcataggacaagggaaaataaaaaaagaaaaaaaagaaaaaaaaacgacaaatctgtctgctggtcacttcttctgtccaagcagattcgtggtcttttcctcgcttctttcaagggctttcctgtgccaggtgaaggaggctccaggcagcacccaggttttgcactcttgtttctcccgtgcttgtgaaagaggtcccaaggttctgggtgcaggagcgctcccttgacctgctgaagtccggaacgtagtcggcacagcctggtcgccttccacctctgggagctggagtccactggggtggcctgactcccccagtccccttcccgtgacctggtcagggtgagcccatgtggagtcagcctcgcaggcctccctgccagtagggtccgagtgtgtttcatccttcccactctgtcgagcctgggggctggagcggagacgggaggcctggcctgtctcggaacctgtgagctgcaccaggtagaacgccagggaccccagaatcatgtgcgtcagtccaaggggtcccctccaggagtagtgaagactccagaaatgtccctttcttctcccccatcctacgagtaattgcatttgcttttgtaattcttaatgagcaatatctgctagagagtttagctgtaacagttctttttgatcatctttttttaataattagaaacaccaaaaaaatccagaaacttgttcttccaaagcagagagcattataatcaccagggccaaaagcttccctccctgctgtcattgcttcttctgaggcctgaatccaaaagaaaaacagccataggccctttcagtggccgggctacccgtgagcccttcggaggaccagggctggggcagcctctgggcccacatccggggccagctccggcgtgtgttcagtgttagcagtgggtcatgatgctctttcccacccagcctgggataggggcagaggaggcgaggaggccgttgccgctgatgtttggccgtgaacaggtgggtgtctgcgtgcgtccacgtgcgtgttttctgactgacatgaaatcgacgcccgagttagcctcacccggtgacctctagccctgcccggatggagcggggcccacccggttcagtgtttctggggagctggacagtggagtgcaaaaggcttgcagaacttgaagcctgctccttcccttgctaccacggcctcctttccgtttgatttgtcactgcttcaatcaataacagccgctccagagtcagtagtcaatgaatatatgaccaaatatcaccaggactgttactcaatgtgtgccgagcccttgcccatgctgggctcccgtgtatctggacactgtaacgtgtgctgtgtttgctccccttccccttccttctttgccctttacttgtctttctggggtttttctgtttgggtttggtttggtttttatttctccttttgtgttccaaacatgaggttctctctactggtcctcttaactgtggtgttgaggcttatatttgtgtaatttttggtgggtgaaaggaattttgctaagtaaatctcttctgtgtttgaactgaagtctgtattgtaactatgtttaaagtaattgttccagagacaaatatttctagacactttttctttacaaacaaaagcattcggagggagggggatggtgactgagatgagaggggagagctgaacagatgacccctgcccagatcagccagaagccacccaaagcagtggagcccaggagtcccactccaagccagcaagccgaatagctgatgtgttgccactttccaagtcactgcaaaaccaggttttgttccgcccagtggattcttgttttgcttcccctccccccgagattattaccaccatcccgtgcttttaaggaaaggcaagattgatgtttccttgaggggagccaggaggggatgtgtgtgtgcagagctgaagagctggggagaatggggctgggcccacccaagcaggaggctgggacgctctgctgtgggcacaggtcaggctaatgttggcagatgcagctcttcctggacaggccaggtggtgggcattctctctccaaggtgtgccccgtgggcattactgtttaagacacttccgtcacatcccaccccatcctccagggctcaacactgtgacatctctattccccaccctccccttcccagggcaataaaatgaccatggagggggcttgcactctcttggctgtcacccgatcgccagcaaaacttagatgtgagaaaaccccttcccattccatggcgaaaacatctccttagaaaagccattaccctcattaggcatggttttgggctcccaaaacacctgacagcccctccctcctctgagaggcggagagtgctgactgtagtgaccattgcatgccgggtgcagcatctggaagagctaggcagggtgtctgccccctcctgagttgaagtcatgctcccctgtgccagcccagaggccgagagctatggacagcattgccagtaacacaggccaccctgtgcagaagggagctggctccagcctggaaacctgtctgaggttgggagaggtgcacttggggcacagggagaggccgggacacacttagctggagatgtctctaaaagccctgtatcgtattcaccttcagtttttgtgttttgggacaattactttagaaaataagtaggtcgttttaaaaacaaaaattattgattgcttttttgtagtgttcagaaaaaaggttctttgtgtatagccaaatgactgaaagcactgatatatttaaaaacaaaaggcaatttattaaggaaatttgtaccatttcagtaaacctgtctgaatgtacctgtatacgtttcaaaaacaccccccccccactgaatccctgtaacctatttattatataaagagtttgccttataaattt

SEQ ID NO: 17471 - DNA, 147 bp, Homo sapiens
ggggccaggagggccacctgccttagcttgctagctccctccctcctcctgggtgctgagggcatccagcaagcccctccacagctcttgcttgccgattatgtaaccaccagcctggtgaaatggatatagacgcccacctgcctc

SEQ ID NO: 17472 - DNA, 320 bp, Homo sapiens
gtctggggcccgtgccagccggcagcccccaagcctgccccgctacccaagcagccccgccctcttcccctcaaccccggcccaggccgccctggccgcccgcctgtcactgcagccgcccctgccctgtgccgtgctgcgctcacctgcctccccagccagccgctgacctctcggctttcacttgggcagagggagccatttggtggcgctgcttgtcttctttggttctgggaggggtgagggatgggggtcctgtacacaaccacccactagttctcttctccagccaagaggaataaagttttgcttccattctc

SEQ ID NO: 17473 - DNA, 1469 bp, Homo sapiens
gcgtccccctacccccccagggcctgctgccttttgggacttaaaccccagcctcccccgtccatccagccctggggctggggggcttcaactatagttgccctgtgactgtagtccacccctgcctgccttgtttgatttggctcttgttctttggttgggcttgtgcctagattaggagaggaagccaggggccctgcactcatgccacctgccaggtagtgtagtatcaggagtggagacaaagtgggctctgggttggggtaggggaagggagggttcagaaagaggaatgaagatgttgtatgacaagaaggaaagttactgagaacaaaaacccagattggtgagataggacacttgtgcagcagatatgccaatgggccatgtttattgtggattggtaagaatcaccaggaaaccattaagccccaatagctacaaggagggtggttaatctgctatatcaaactccttccctgaaaccagcaaacaccgggaaacattttggctcattataatccggtgaacaatgcagtcaggcctgttataaccgctgagcagccacactcgcacctcctgggtgctgtagtctgtgttggtacaggcttctgcatgcctggtaaagtccagccaaggctggtcaaggcaacatctccacacagaaaatctgcaccagttatgtaagctaaaaagctgtgtgaacccaggtgtcccggaaaggggctgcaggacacagcaaaatgccagcagcgtgccggacccctcccttccatcctcctctccaaagaacagaggtcaggaaaaacactggctgggacgctagaagggtcatgtgttaactataatcacatttatggtttggaaccatcaccccaaggtaaaaaaaaaataaaaggtattcccaggtatgtttggcaaaataaaataaaggtaattaaaaacctaagaaatggctgtaaactgagattacaaaaaaccagaggccttttgggagccacaggctgggggctggggccaacataccccagctctgggaccaaaagcctttggagtcctgtccctggatacagatgctcaggccacccacctagcactcctctcatttttgctgctcccccaaaagccagcgctgttctacaatagttcaggtcagacatctaagatccccaggccaaaccatgccacacacgtgtctgttccgaggtcttgttacaaatgaccaaaggttagcctagacctttggtcaggtggtgaaggccctgggaatgcaggttctagaaggggtgggggcatggggcccaggaggttgctagagataggaaatggggcaaatcgcaggtgacctcagcagtacctggatgattcccaccaaggaggaatggccaaaccagatgggtgagaacaagcccaatgtgatgcacacctacccttgctaaataaacgctgctggtcagcctctagcccac

SEQ ID NO: 17474 - DNA, 1042 bp, Homo sapiens
gcctggcctgggcaaatggagcgaggtcccactttgcgtctccttgtaggcagtgcgtccatccttccctagggcaggaattcccacagttgctactttcctgggagggcctcatgttttatctggttcttaaatgtttgttactacagaaaataaaactgcgctactattccaagtctgagtttatttgcagctggggcacctcccaatattcttgttgtgcttgggttgctgggggggggttctagaattcagatattcaaggagtacaaggaaattgaagacaatttaggaaatggaagaaaatgaaaatcaattgggttctgtcattcaggattaactactgtcaacattttggaatacttcctcagttttacagttgcacttacatagtaaatgtgtaactgtaatatacaccacataatatttgcaagtttagtgttaaatttttttcctgatttttaaatctaacatgagcttttttcctctaacgatcagtgaagaaagtgctggggcaattgactagtgtctggggcaaggagttggctccctggaaaatacagtgtctccagccttagggctcttttatagattctatcagattttctgagagtgaaaaggaagaggtacaactgcttttattctcagaaaacaaggaaatggtttgatccttttgagtcttgctttgaagatgtgctgtgtgggaccagagcagctcttaactgtaggcttgtttccctctatggaggcaacaaacaccattctgggcaccctggccagtgctgcctaggtgaacatgagcttctctatcctggtgggtggggacagctgctagtccctgtcctgcttgcacactggagttaccgttcatcctctcctgctggggtgatggccttccctggtcttgggtagcttcctcacacgcctgtgctcaccagtagtcgtagtccgctgcacactggaacgggagcctctgtggatatccagggttctttccctgtgcagctctcttctctctggttctccgccctgcaaactccag

SEQ ID NO: 17475 - DNA, 1822 bp, Homo sapiens
aattctcggagcatggggaggtgcccaacgccaggctaccgctgcatgtcgcactaagtgtgttctcctgttgcagttgggctcatcatcgtcatagctggcatgtacctggctctggccaggtgctaggcactcctcacagcttgacctgggtttgcttccacaccctcagaagaggagagccggcacagcagaggcaccggcgatgaagtggcacagccccagtcggaatccagcggcttctgaaagtgccttggtgtgagaaggaggaaggggccgcttggagagctgggctctcgcatgtcatgtttagcccactgagaatataccctcaggtgactccctcccgatcctgaaagggaaagcagctgtcacctgacttctggcgggtccaacatagccctcagcttacctctgcaggaggccgagtgacagccagccctggaaccccccgacccccgcagctgctgcagccagtgtgccagtgtgcgttcgacaaatggaaaagcagattggggccagggagtcagcaaggcaccccagctctgtgatgtgactttgggcgagtctcagtgccacttggtccccagccatggactctatacagtgagggccactcaccgacctgagtcagtgtcctctgtctcacagggcccctctcccttctgttcagtaaacaaactgaagccaaaaatgaagccgtggccaagcgtgacccagagatggggtgtcctggcccttagtgacacagctcctctctggggcaccctatctgcttgtctcgtccaggaagcgttagggctgatgggtgactcagcaaggcagtgtcagagctgggactgggcgtaggcctttgtcctcatccccagcactggcctccctgtggaagatgaacatatcccagccacctgtgtacaggggctcactttgtgtgctccttgttgcctgagaagaaaccttggggtgccagggtgggggcagaagcatgggctgggttccggttcatcctcctccaccctgccgtgtgtgtgggcacaagaggacatctaaccacctgctccttggaggaggcccccaggggtggtagaggctggaaggaagccacatcaggaggacgccactccggcccttcacccttgccaagtgagctgctcacagtgtggtcagggctgcgcgtgctggaggccctcctgcctgggccttgtggggcaaatattgggtccccaggctggaaagatggacagaggcccaatgggtgaaggctttgaagagcacacagaagcccctggccccccacgagagctggagagccatgtatatggcttcaaagccacctacggcagggacacactcgtgagcatgtgtggcctgcagttcaggtgatacatttaccagtgttcttgtttgtgtggtgccaggaaattgattttggaaaaagtgaaataacattaaaggtgaatgtgaggcttctacttttatccaaaaggagctatattagctaggctgtttctgatatccaatcattggtttaacaataaaggcaatttgtttaatcagttaacggaaatttcttggcttatgaaagtgaaaagtccagtggtattggcattggcagcaggtgagcaatttcacccagtgtcttctgcctccctctgcgttggtatctgctacatcccaggccaccacctccgaggatgaaaagatggctgcctgcagcttccacggaatccctccctcactgccagagcagcatcttctctgtgtaccacctctgctgtctcagatgcccccagcaaataaacactcttctcgttggtcagaa

SEQ ID NO: 17476 - DNA, 198 bp, Homo sapiens
ggcctctgggtcaagctttcatcagccccagcccccacactccaccaaagttctcatgcactatgcactcagaaaaatccaggcttattttttttactgattttttattctccagctttcagtgccaaagaggccatgctgagttaggtaggtgggcgctgcccagaaaatatatttcaataaaagagagaagcaagc

SEQ ID NO: 17477 - DNA, 636 bp, Homo sapiens
cacggccagtgccaggaccgggccgagggaggccagaccaagggaggcacgcgcgctgccgggcggacagaggctgaggctcacaccccacacccgggcaggagcgctccctggccccaacacatcggggctccgaggcagtgaccagaacgtggtctcaaggtggtgggggctatgggggctgcagggggtagccctgccgcactttgtcacgggagcccagggtacccgcctccttttcgtaacactgttccccccggtcagcccatctagccctgtcctccattcctcacgccatctccatccccatcttgagtcctggaacggccctgggtgcctgcccctcactgtgcaactctgggagcagcccggcaggttggggcgtcttccagaacctctcccttctggagccactctgcactgcgggctaaacatgtttccagtgtgattccttccagtgagccaaacccggtggctgcttcatgagcctgactgcctctcgcctgctctcagcaggaagggacccctggagcaggctggcccggggtggtgaagtagctggagcccgatcacagtcccgcggtttgtcagggggcccaccttctagatgaccccttaataaagtgatggccccac

SEQ ID NO: 17478 - DNA, 609 bp, Homo sapiens
gccctgggcacccacctccacccccgccacggccaccctccttcccgccgcccgaccccgagtcgggaggactccgggaccattgacctcagctgcacattcctggccccgggctctggccaccctggcccgcccctcgctgctgctactacccgagcccagctacattcctcagctgccaagcactcgagaccatcctggcccctccagaccctgcctgagcccaggagctgagtcacctcctccactcactccagcccaacagaaggaaggaggagggcgcccattcgtctgtcccagagcttattggccactgggtctcactcctgagtggggccagggtgggagggagggacaagggggaggaaaggggcgagcacccacgtgagagaatctgcctgtggccttgcccgccagcctcagtgccacttgacattccttgtcaccagcaacatctcgagccccctggatgtcccctgtcccaccaactctgcactccatggccaccccgtgccacccgtaggcagcctctctgctataagaaaagcagacgcagcagctgggacccctcccaacctcaatgccctgccattaaatccgcaaacagcc

SEQ ID NO: 17479 - DNA, 290 bp, Homo sapiens
ccgactgactgctgcagaccaccgccaactgcagctctccatcagctcctgtctccagcagctttccctgttgatgtggatcacgcagtgctttctgcccgtgtttttggctcaggctccctcagggcagaggcgctaagcccagcctggcgccccttcctaggtcatgcctcctcccctagggaatggtcccagcacgagtggccagttcattgtgggggcctgattgtttgtcgctggaggaggacggcttacatgtttgtttctgtagaaaataaagctgagctacg

SEQ ID NO: 17480 - DNA, 2929 bp, Homo sapiens
gaggtgcgggcttgtgccatgtgtgaaacagggaagcttggggctcagtttgagttttttcttttttttttttttttgtccactaaaaacacactgatggtcaacacaggtcaaaaccaagagagaatgtgtagttttcaaggtcttggccagaacctttaggaaagaagacctgtttatacattgaaggaagaaaagaaggaagcagttgccttccggagggggctctgagagaatctagcctcccctctgtcctattggagcaaagattggagtgagtgttgccaccaacaggattttatcgtttgactccaatacctgaaattctgacttctctcctgtgcttcaatgagaatgataaattatcctagcaaaggggcctctggagaccatcttgttccagcctctgaagacagttgaggagatcaagcccagcaatggtggcagaatcttactccacagacttcagcagactagtcatttcaatacccaaagaaagacaagtgacaggggcaatggatctcaggctctgagataagtatatcagatgacactggtggctctaaggatattgcaattaagcagctacctgtagccaggtattctgctgctcttggccttttcccacgcatcgtctcgtgtcttctccgaaagaccttggaagataggcctggaagagactgttgatgccactttgaagaaaagaacactgagaactagaggagggaacactttgcccaagattactcacaaagccaagacccagagtccagcttagagaatagagttgttcaggctgccaattgcaagctcattcctctacctcatacttcctctgaggattttgacaaaatggattaattgggtgagccttggagacatgtgggaaacacctgcagacacaaaatgagtagtcatcctgtctccctttcaatagggatctgaacaggtgttttgatacttgaaagatgtgcatgtcaagtgagggtttctttctgcgatgttcaactggaactctcccatcagtagttacaattagaaatacctactgatggttagtctgaaggccattctcatggtcacctatacagtgtgtttccctgtgagctagcagacacaatgaccaggaaaaaacctatgaattccattcttaggtttcccagccaattgctcccttctgctttagaagtgactaggtactgagagtacaaacactcccactttataatgaaggcgtcatgtcaccccttcctttacaggtcctggggtccaggagacccagaatgaaggtgtcagttgggcatgaagtgttatttagtgtccattcttgatccttctgagcacctacagctggaaactaagcagatactggtcctgcattctgactgagattgtgtcttctttatgaggatagatcaaattggcagtcaggcccatgatagtcagtgcagttggggcagttgtagactttgctacaggatttcagggtttccaatcaccccacaggtaagtgaatgccaaagtcttcttttttcagaccatacaagaagtcattttgattttcaaagaagccgttttgattttcaaagaagcaggttctggtgacattattttcttccttggacaaagtggggggaaatttctaagtattttaactgagttcagggtccttagtgagcctggacagagcaaggagagggctccccactccctaagccccacagccagctctgcatcaccacacacagccagagcctgtgaggagctgccttcttccccatgtgacttgcaaagagtctcaggcaagaaaccagggcttcaaactgctagttcccatggagggtagttccctcgtgtggagcacttgtgttaggatcactgattatctgacaaaggctggtgcagaaaaaaaattgtaggcccaagtgtcaagaaccacaccagattggagatagaaaagaatagctgaaattatgtcagtggtgaaatgtcactccattgacccaccgaaaaaagaaaagaaatctgtttctaccaaacatttccagaaacgtatttatagcatgaagaaacacacatgggtagtgtgacctgtttggatgtgattacttaaaaatggaatgctctgaataggcactctctacattaaaggtatggaaggcgataggggtcagaattttaaaaatttaattttgaaaaaggtgactcacccctcatttccagagtgtaggcaattatgtcctgctttgataaaactgctagaggatggctatgcaaaagcataacgattcaaggaaacaaagtacaggtagtttttgagctgacagcagcaaaggcaccataagtcaaaatattggttttggtggagatgatcgatgtgtgtgtgtgagagagagctatgtttctaaccaagggcctaatgtttgttacagaaatgatcccagagacctacaagatgtgggaatcagcataacagggcaatgcagcaattaaccccacatcgttttctgtagttcctttttgtttcattttcttctgtctcacctcgttagaaaattcctcccagtcaggggtcgtccagtgcaggacgggggacccaagggtctcaagcctgcaagtccagaaggtgacaaacccaggagcactgggagttaagctttccttggggagggaagagccttgatgtccagcacacagcctggctataaagacacgaagcgacctacccactgtacagtccacttcacaggatcagctgaatcatgacctttaaaagttccgagttgaaactgaaggctctcctcagacctggctttttcctcagtccctgttcataccatctctgcacccacaatcacactgatttttcaaattcattttgtttttgctgtttcatttctggcattaataaaagtcttataaggagaaa

SEQ ID NO: 17481 - DNA, 484 bp, Homo sapiens
gcttgtagaatgggggaacccactgtatgcccctctccagcatttggaattccacccgccttgctttaagacaaacagggctgctccaactagttttgtgtcagcttccagctctctgcagctatcctaattcagccagtaaggttcagtcttcttgctcaggctcctgaagggttgattctcctgatagatggggccccactgatctggatttgaaaaggatttctagaaattgggggtaagaagtactaccaaaatgtaactgctaatcaagggtgatgcacagcaaaagcaatggaccccatccctctaaagcctgccctcctttgccttcaactgtatatgctgggtatttcatttgtctttttattttggagaaagcgtttttaactgcaactttctataatgccaaaatgacacatctgtgcaatagaatgatgtctgctctagggaaaccttcaaaagcaataaaaatgctgtgttg

SEQ ID NO: 17482 - DNA, 1802 bp, Homo sapiens
gggtggccactgcagcacctgccactgccgtcacctctccctcctcagctccagggcagtgtccctccctggcttgccttctacctttgtgctaaatcctagcagacactgccttgaagcctcctgaattaactatcatcagtcctgcatttctttggtggggggccaggagggtgcatccaatttaacttaactcttacctattttctgcagctgctcccagattactccttccttccaatataactaggcaaaaagaagtgaggagaaacctgcatgaaagcattcttccctgaaaagttaggcctctcagagtcaccacttcctctgttgtagaaaaactatgtgatgaaactttgaaaaagatatttatgatgttaacatttcaggttaagcctcatacgtttaaaataaaactctcagttgtttattatcctgatcaagcatggaacaaagcatgtttcaggatcagatcaatacaatcttggagtcaaaaggcaaatcatttggacaatctgcaaaatggagagaatacaataactactacagtaaagtctgtttctgcttccttacacatagatataattatgttatttagtcattatgaggggcacattcttatctccaaaactagcattcttaaactgagaattatagatggggttcaagaatccctaagtcccctgaaattatataaggcattctgtataaatgcaaatgtgcatttttctgacgagtgtccatagatataaagccatttggtcttaattctgaccaataaaaaaataagtcaggaggatgcaattgttgaaagctttgaaataaaataacaatgtcttcttgaaatttgtgatggccaagaaagaaaatgatgatgacattaggcttctaaaggacatacatttaatatttctgtggaaatatgaggaaaatccatggttatctgagataggagatacaaactttgtaattctaataatgcactcagtttactctctccctctactaatttcctgctgaaaataacacaacaaaaatgtaacaggggaaattatataccgtgactgaaaactagagtcctacttacatagttgaaatatcaaggaggtcagaagaaaattggactggtgaaaacagaaaaaacactccagtctgccatatcaccacacaataggatcccccttcttgccctccacccccataagattgtgaagggtttactgctccttccatctgcctgaccccttcactatgactacacagaatctcctgatagtaaagggggctggagacaaggataagttatagagcagttggaggaagcatccaaagattgcaacccagggcaaatggaaaacaggagatcctaatatgaaagaaaaatggatcccaatctgagaaaaggcaaaagaatggctacttttttctatgctggagtattttctaataatcctgcttgacccttatctgacctctttggaaactataacatagctgtcacagtatagtcacaatccacaaatgatgcaggtgcaaatggtttatagccctgtgaagttcttaaagtttagaggctaacttacagaaatgaataagttgttttgttttatagcccggtagaggagttaaccccaaaggtgatatggttttatttcctgttatgtttaacttgataatcttattttggcattcttttcccattgactatatacatctctatttctcaaatgttcatggaactagctcttttattttcctgctggtttcttcagtaatgagttaaataaaacattgacacatac

SEQ ID NO: 17483 - DNA, 366 bp, Homo sapiens
ccaacagctacatggaatcaaagtgtcaggctgtcatccaagaactgcgtaagtgttgtgctcagtatcccaagggaagatctgtcgtctgttcaggatttgaaaaagaagaggaagaaaacctaacacggaagtctgcatcaaagtaaagttcttctgaagtgctgctccatgtttccaccaaatgaattttttttatcctcctgactcttcaggccaggtagcagcaaatagcaaatgaaaaagtcagctacaaaagttaatgaatatgccatctatgcagaacaggcagaaatataaacacattaaaagacaaatatgtagaatgtaatatactgagctgctaaaataaacctgtttaagaga

SEQ ID NO: 17484 - DNA, 2561 bp, Homo sapiens
tcagttcttttatttccaaaacatgctctcctacttgaactgaaaagtaagagaaataaatagaatctttgtgtaactgatgagaactcaacctccatttggataccaagtgagcctccctctcagggggactctgacagactcgtgtgcgggtggatgggggtgcctgagtgctgtgaccaagggactgaattgctgacatgggccaggccaggcactgttttgtggcccatgctaggcagtggctgctccatgagccctttgtggaccacatgttaaaggcctggggtttaggaagctaagtcccaggaaaacatacctacagacaggacaactgttccttggtatttgagctcacttataggccatgaacataaagaaatacataaaggggaaaaaagtttcacaatggggacaattagcataactaaacaaagattatgagctctacttattccgtgagaataccctgcaccaaaggtgtttgctgggtttggttaaaaggtaccaattagcttttaacagctttctgtaaaatgaggaacacagaccaaaaggtctggtgttcaagtaaaaatgatgtgactatggaaaggaaggcaatcgacacagttattagcacatttcagaaaatgaacacccttgtgatagaattaccagctgtatgaaacaaattgtcccatgcaaattaccctataactaggaaagagacactataacccaaatgccataccccctttttcctttgaccatgcctggggtttcaatgccttggcacctgcaatctggaagtaaacagtctgcttgcttcttcaggcacgtgacagtgacaacacagtgactgcctctgaaaagagccctgaggcaaacactctctcctgctgaacaggaggcactgtaacccttacaaacagcttacagttacttgggctacttatttgatcatcataacaggcctacgaggtttttgccccattttacagaatagtaaactaagagccatgaaaatcacttggccagggtcaaggactcgtgactcctagctcttttcactgcatcatactgctgtcagatgaataaatgattatgaatttgtttacttgggaagagatatgactataaataaatgttctctacatgttaggatatgttttccttattgattacaactcagctataatcctgagggaacatgggaaggaatcaaaggtaaagcccattcaggcattattgacaagagggctttaaacaagtgaataattgcacaactaaaaagacattagaactgtgtgggctataagtgttcttatcactgagacacagtggatttttattgaaaggaaccacgtacagcaatgcggagtgggatagggataaaatacccaccccaaaatgaccttggccacctgtctgccatatacgtacactgagttcctgtctacccaagagagtcagcccttaattctcaggtgaacaaacagctaactgcatcagcaaattggaatggctggcttgaagtttccattattttcttgaagagaggtgatgctttaaattactttttggattgtagccagttcagctaggcaaaagccatacttttcacaattaaaaaaaaaaactattctgactagagtcaggtttctcatatccatcgtgataggaaggcctaagaatggcaaatcgctttgagatataatattgaacttcagtatgaatgtgaccgaatctgaaactttgggaatttgctttagccagaataaagaaaccaaatcatgaaaattatggaagactattctgccacctgtgccccaagttggatgagcaaaccactttggatcagttcacagcattaactacaagtgaactgatcatcttctctatattcatttcacaagagctggcttaggtggggtaattaaattgccaccttcgtggttgtaaaagacaaacaaaacatggcaaatttcattaacacaaaatttcatcaactgctatactgaattatgtttagaagattctgaaagcaagattatccagtgggtaaatgagagtcgactggattctgtcagttcaaaaaaggaaagaaacaaaacttccctacaattttcttcactaaaatttattatatgtacagtattcccactcctggcattttctggcaggtttaaaaatattcagcataaatccagcagaggtggctgagcttaattgcttaaataagttctagaaaatttaaaaatcattttagtagaattcagtaccattgtcactgcaataagtgggttttagaaaataagtgtgaaaagaatcaggtgttaatataatactaaggataaagctttagaagctattttactacataggtaaagaaaagataaactaacttgtaacaaagaccacaactgcatgttggattagattgtctcatatttcagaataaaatgtactgtatacttttcctcactttgttgtgcactgtaatgaaatgtgaaaaatgctttatttagctgtatgtgaatgaaaatatgcttgtatttagtaaaatgattgattatgtg

SEQ ID NO: 17485 - DNA, 1691 bp, Homo sapiens
gagagctcttacaggagaaaaggctatatttgtgatcagattttacttattgacatattagaaaggtttttgcaaataagaatatgaaaaatactgtttcttctatccaactctcttatgaaaaggaactctgtattttctattagccataaataatctgtccactgtattttacaggtcttcatacttttacttaattttctttatctgtatggcaaaccactgcaatcctgaatgacatggaaagcatcacaatcttttgccctttgcttgaattcctggaatgcatacatataagctaaacagatgtctgcagttataaatgtcataagtagaggtacaatctcaccctgctccttagaaacatttccatataaatcgctaaaataatttcacatttttgttagtttaatatatacatgagtttatttctgatataaataataaatacagagagtgagcatatcagagaggcaaattcttaaagaatgatttttaaaatcagctctaggaagagctcaagatcaattggtcatagaacagcatttgacgcctagaactatgaccacctcatggtcagagatgagaatgtagcctttgtgaccagattatattatttttaaatgaagaagcactcattaaataaaacataattttaaaaaacaatataagaaacaaagtcaactgaatcttttattcatagaaatgaaaaggaaaataaaaactgtggctgaccaaaaggtcttcttgttgtccataaaaggataaggtaaacagtccttagataattacaaaactttctacaaaagttaaaatgttacattactatacgtattcagattcacttgttaaagtactcttaaatcattcaaatctggaaacaaaagctgaacttaactcttgctccctcaaaagagaaacacaagcataagtgcagcttcaaaaaaggaaaatattttaggctttggtggaagggtggagtttagataaaatttaaatgaagtagcgttttaataggttcaaagaaaagtaaggcaatgagcaaactcaaagtactgtccttgaaaaccatagagtcaagataaatgtatagtgtatggttaggtggcagagaaatgcaatcatgttgataatctttgagatacatcctgtcatcagtatatttcagaatacatgcaatgcactagcaagttacaattgatagaatacatttgaaatgttaaatgaaataagccaggcacagaaagacaaacaccacatgatctcactcatatgtggaattttaaaaagttgatctcactcatatgtggaattttaaaaagttgatctcacacaagtagagggtagaatcgtggttaccaggggctagggagagaaagaaggcagaggcactgaaagatgttggtcaatgggtataaagttacacctaggaagaataaattttggtattcaccacagtagggtgactatagcaaataataatgtagcatgtatttcaagatagctagaaaagcaggtttttaaatgtcaccacaaagaaataacaaatgtttatagtggtggatatggtaattacgcctatttgatcattatactgtgtgtacatgcattgaaacaccacattgtatcccatatatatgtacaattatgtgcccattatacatttaaaaaataaattttaaaaaccttca

SEQ ID NO: 17486 - DNA, 60 bp, Homo sapiens
attgcagtagcagcatatctttttttctttgcacaaataaacagtgaattctcgtttctt

SEQ ID NO: 17487 - DNA, 1857 bp, Homo sapiens
cagtgtgtctacaagcttgtaaagatgttggccttgaagcagaaaattcattttttaaagccagtcttgttcacatccattactatacattgaattatgctgtgtaaaaatagaattattgcttctagtccacttttctttacattttattcaatacgctgtcctgaatcctattcagtttctttaatagatgaggaaaaatagcaacaagcaagttgcttataataaaataatttgtgattctatactgaattttcagtcataaaagctttactatttatttacatatttattcatgttcatggtactcttctaagacaaaatcagattgataactatgaaagtaacatttttgacccatttcctcctacacaagtgtttcacattggagacatctgctaatataaatgggaggttttactgtcaagtccaattagcaaaacgtggtaataatttttttgtcagtattttcagattacatgataaaattttacatttgagcttctagcattgattaatataggatattgaccacgtttatgtttaaatttcattttgttcagcagacaaaatgtacttcccttaactttcattaatagtgtttacatcttttgtcagcacagcaaacttttagaaagtaatagttttacttatttttatcttctgttttctctttgtactgctttgtcttgcattgtgttccaacacatgagacttactgctcactgaattttggagtcttttagaggtaaattgtggactcaggattttttgaaacttggtgtgtaactctaaatcttgtatatgcatctttgttgcttattacatatttacacacacaaccacaaattttaaacttatgatgaaaatttacaataacctgaaagatccagagatgtatgagagcattttgtaacttgttattcagttactaaatttgaggtgaataattaaaaagaaaaggacattaggagagtgaaaatcttctcttcaaataatctttgatagataaaaatggaaggtaagatgtttctagatagaatgttttcatacaatttcagcttcatatcataaatttttctggaaagctatttcagacatagatttcatagtatttttctgagaatcctgtgaaggaacgctgtctctttgcaaagtaaggaggactaagggaaaatgatggtaccatgtaacagaatgagagctaattccaaattagcaacttcatcctgctttctattttacattgagtaaagttttaaaaagacaacagtcaagttgattttgattagaagataaaagtacataatgaaaatccatggccttatttggaatatatatcactttccaaattttattatttatttgagagttaataagttaatgttattaagcagttaataatttatatgtatggatataatataaaatgaattcatataattaaaaagaatttggttaataagaatttggagaatggaaaatacatttttaggttccttaatttggctgttggtacctgtgtatttggaatattttaggggattcgaattttttttaacccacattacagctaccttctagctttagtatggtagtgcttcattcaacttttgctgtcaggtttttattttcacctttttctgtgccaccaattcaaaagttataggattaggaaatataaatttatatttggtgattggcagcctctgaaatgttagattaatttgatctagttctaaagtgctttagtcatatatgaatttaaacctagtaccatccaaaaccatgtaatggattttaagaatctgttaggccttcttagcctttatacatgtccctacctgatttttactg

SEQ ID NO: 17488 - DNA, 237 bp, Homo sapiens
cccagccaaagaaaaaggtcaagatttctatcacttccccgtcttctccagaacttgtgtctccagaggagtacgccgacttcagcagcttcctgctgctagtcgatgcagcagtacaaacggctgccgagctggagctagagaagaagcaagagcctaatccatgattgatgatgttccaaaaacccaagtagtcagtcccttgtgtactgtggtaaacctgtttatgttcacccc

SEQ ID NO: 17489 - DNA, 1083 bp, Homo sapiens
actattgaaatctgcagtgagatgtaactttctaggaacaacaaaattccattccccttccaaaaaatttcaatgattgtgatttcaaaattaggctaagatcattaattttgtaatctagatttcccattataaaagcaagcaaaaatcatcttaaaaatgatgtcctagtgaaccttgtgctttctttagctgtaatctggcaatggaaatttaaaatttatggaagagacagtgcagcgcaataacagagtactctcatgctgtttctctgtttgctctgaatcaacagccatgatgtaatataaggctgtcttggtgtatacacttatggttaatatatcagtcatgaaacatgcaattacttgccctgtctgattgttgaataattaaaacattatctccaggagtttggaagtgagctgaactagccaaactactctctgaaaggtatccagggcaagagacatttttaagaccccaaacaaacaaaaaacaaaaccaaaacactctggttcagtgttttgaaaatattgactaacataatattgctgagaaaatcatttttattacccaccactctgcttaaaagttgagtgggccgggcgcggtggctcacgcctgtaattccagcactttgggaggccgaggcgggtggatcacgaggtcaggatattgagaccatcctggctaacatggtgaaaccccatctccactaaaaatacaaaaaattagctgggcgtggtggcgggcgcctgtagtcccagctactcgggaggctgaggcaggagaatggcgtgaacccgggaggcggagcttgcagtgagccgagatggcgccactgcactccagcctgggtgacagagcaagactctgtctcaaaaagaaaaaaatgttcagtgatagaaaataattttactaggtttttatgttgattgtactcatgctgttccactccttttaattattaaaaagttatttttggctgggtgtggtggctcatacctgtaatcccagcactttgggaggccgaggcgggtggatcacctgaggtcaggagttcaagaccagtctggccaacat

SEQ ID NO: 17490 - DNA, 4275 bp, Homo sapiens
agctaaaatagttacttcaaattttcagaaaagatgtatatagtcaaaatttaagatacaattccaatgagtattctgattatcagatttgtaaataactatgtaaatagaaacagataccagaataaatctacagctagacccttagtcaatagttaaccaaaaaattgcaatttgtttaattcagaatgtgtatttaaaaagaaaaggaatttaacaatttgcatccccttgtacagtaaggcttatcatgacagagcgtactatttctgatgtacagtattttttgttgtttttatcatcatgtgcaatattactgatttgtttccatgctgattgtgtggaaccagtatgtagcaaatggaaagcctagaaatatcttattttctaagtttacctttagtttacctaaacttttgttcagataatgttaaaaggtatacgtactctagccttttttggggctttctttttgatttttgtttgtggttttcagtttttttgttgttgttagtgagtctcccttcaaaatacacagtaggtagtgtaaatactgcttgtttgtgtctctctgctgtcatgttttctaccttattccaatactatattgttgataaaatttgtatatacattttcaataaagaatatgtataaactgtacagatctagatctacaacctatttctctactctttagtagagttcgagacacagaagtgcaataactgccctaattaagcaactatttgttaaaaagggcccctttttactttaatagtttagtgtaaagtacatcagaaataaaactgtatctgacattttaagcctgtagtccattattacttgggtctttacttctgggaatttgtatgtaacagcctagaaaattaaaaggaggtggatgcatccaaagcacgagtcacttaaaatatcgacggtaaactactattttgtagagaaactcaggaagatttaaatgttgatttgacagctcaataggctgttaccaaagggtgttcagtaaaaataacaaatacatgtaactgtagataaaaccacatactaaatctataagactaagggatttttgttattctagctcaacttactgaagaaaaccactaataacaacaagaatatcaggaaggaacttttcaagaaatgtaattataaatctacatcaaacagaattttaaggaaaaatgcagagggagaaataaggcacatgactgcttcttgcagtcaagaagaaataccaataacacacacagaacaaaaaccatcaaaatctcatatatgaaataaaatatattcttctaagcaaagaaacagtactattcatagaaaacattagttttctcctgttgtctgttatttccttcttttatcctcttaactggccattatcttgtatgtgcacattttataaatgtacagaaacatcaccaacttgattttcttccatagcaaaactgagaaaataccttgtttcagtataacactaaaccaagagacaattgatgtttaatgggggcggttggggttgggggggagtcaatatctcctattgattaacttagacatagattttgtaatgtataacttgatatttaatttatgattaaactgtaattttgtaacataaactgtggtaattgcataatttcattggtgaggatttcctttgaatattgagaaagtttcttttcatgtgcccagcaggttaagtagcgttttcagaatatacattattcccatccattgtaaagttccttaagtcatatttgactgggcgtgcagaataacttcttaactattaactatcagagtttgattaataaaattaattaattttttttctccttcgtgttgttaatgttccaagggatttggagcatactggttttccaggtgcatgtgaatcccgaaggactgatgatatttgaatgtttattaaattattatcacacaaatgtgttgatattgtggctattgttgatgttgaaaattgtaaacttggggaagattaagaaaagaaccaatagtgacaaaaatcagtgcttccagtagattttagaacattctttgcctcaaaaaacctgcaaagatgatgtgagattttttcttgtgttttaattattttcacattttctctctgcaaacctttagttttctgatgatctacacacacacatacacacacacacacacacacgtgcacacacacacatttaaaggatataaaaagaagaggttgaaagattattaaataacttatcaggcatctcaatggttactatctatgttagtgaaaatcaaataggactcaaagttggatatttgggatttttcttctgacagtataatttattgagttactagggaggttcttaaatcctcatatctggaaacttgtgaagttttgacacctttcctatagatataggaatgaaccaatacgcttttattaccctttctaactctgattttataatcagacttagattgtgtttagaatattaaatgactgggcaccctcttcttggtttttaccagagaggctttgaatggaagcaggctgagagtagccaaagaggcaaggggtattagcccagttattctcccctatgccttctcttcctaagcgtccactaggtctggccttggaaatctgttacttctacggcttcagatctgatgatatctttttcatcacattacaagttatttctttgactgaatagacagtggtataggttgacacagcacacaagtggctattgtgatgtatgatgtatgtagtcccacaactgcaaaacgtcttactgaagcaacaatcgaaaaatggttctgttttaaaaaggattttgtttgatttgaaattaaaacttcaaactgaatgacttatatgagaataatatgttcaatcaaagtagttattctattttgtgtccatattccattagattgtgattattaattttctagctatggtattactatatcacacttgtgagtatgtattcaaatactaagtatcttatatgctacgtgcatacacattcttttcttaaactttacctgtgttttaactaatattgtgtcagtgtattaaaaattagcttttacatatgatatctacaatgtaataaatttagagagtaattttgtgtattcttatttacttaacattttacttttaattatgtaaatttggttagaaaataataataaatggttagtgctattgtgtaatggtagcagttacaaagagcctctgccttcccaaactaatatttatcacacatggtcattaaatgggaaaaaaatagactaaacaaatcacaaattgttcagttcttaaaatgtaattatgtcacacacacaaaaaaatccttttcaatcctgagaaaattaaaggtgttttactcacatggatatttcaacattagttttttttgtttgtttctttttcatggtattactgaaggtgtgtatactccctaatacacatttatgaaaatctacttgtttagacttttatttatactcttctgatttatattttttattataattattatttcttatcttcttttatattttttggaaaccaaatttatagttagtttaggtaaactttttattatgaccattagaaactattttgaatgtttccaactggctcaattggctgggaaaacatgggaacaagagaagctgaaatatatttctgcaagaacctttctatattatgtgccaattaccacaccagatcaattttatgcagaggccttaaaatattctttcacagtagctttcttacactaaccgtcatgtgcttttagtaaatatgatttttaaaagcagttcaagttgacaacagcagaaacagtaacaaaaaaatctgctcagaaaaatgtatgtgcacaaataaaaaaaattaatggcaattgtttagtgactgtaagtgatactttttaaagagtaaactgtgtgaaatttatactatccctgcttaaaatattaagatttttatgaaatatgtatttatgtttgtattgtgggaagattcctcctctgtgatatcatacagcatctgaaagtgaacagtatcccaaagcagttccaagcatgctttggaagtaagaaggttgactattgtatggccaaggatggcagtatgtaatccagaagcaaacttgtattaattgttctatttcaggttctgtattgcatgttttcttattaatatatattaataaaagttatgag

SEQ ID NO: 17491 - DNA, 187 bp, Homo sapiens
atatgatggagcatcagattttacctaatacagcagaactcctaaaaagttacagccatatgcaggacagcagtactcagcatggtcttatgcacaggaactaaaggaaaaagagatcgagtcacaaaaattcaggaagagggggtaaatgtggattgtatggaatgaaaaataaacattctcaagg

SEQ ID NO: 17492 - DNA, 190 bp, Homo sapiens
aagtaaacacaaaatatagaaaaaaagaaaagaattctaatgacctgccttgaatgcatggggttgcagctctgttcaaacacaattctatcagctccaaaatgtgtgaacttgacttgtgttagagtatattctgaaaccaacttgtcccaggccacaggagtgtatatgtttcataatctttatcaag

SEQ ID NO: 17493 - DNA, 5834 bp, Homo sapiens
aaacaggaagattggaatctgcctggaacaaagaactgcacctaagcagaccagaagcaaaatgtcttcttcacggcctgaggacatttccagttttctctgtacctgtgtgtatagaaatagatcagagcacagttgaaattcatggaactggcattatttaagcaaccagaattccacactgtaggaaggttttgaaaattgtttcgttatagattttatcttatcttttggtgttgtcttggtttttctcatagactttataagtttgaactggacttatttgattataaccacaaattgtgtgtgtgtgtgtgtgtgtatatatagaagtcattatggcagatgcacaaattgtgcagtgatgtaaatatacatacttcacagagcctattatttttatttttcaattcagtttctcaaattatcttcccttctcttggggacaacatctgaagggtatgttgcatgcatttttaaaaaaatcatctcatatgcattgtatagtttgggggaataagatatccgggggccgggggtgtctacattcagtatctttagttcttcctacctagtaacttgagactttaaaagaagaaacatggagaagatgtgggagcgaatttattgcaggaatccacaatgactttgaagttgttggagcaatgcattgtattcagaaaacctgtgtcacattaaaaaatttcatctaggctaggtgcagtggcttgttcctgtagtcccagcactctgggaacctgggttgggaggattgcttaaggccaggagtttgagaccagcttgggcaacatagtgaaaccctgtctgtatggaatttacacaaattataaaaattagtcgggtgtcattgtgcatacctgtagtcccagctattcaggagctgtggtaggaggatggcttgagctcaagaggttgaggctgcagtgagccctgattgtgccagtgcactccagcctggacgacagagcaagaccctgtattaaaaaaaaaattcatcctgcacagggaaatggctacctattaaagtcccagttgaaattttttgaaaaaatacacctcccacagttcacaaataacttttaagatcagctcatctataaggctgaccttcatgcagagattttatttcacctttagttttgggaaaagcgagaaacagatgatctataggatgtgagtgggtggcagagtcaaaaggaacctcacctgttcctaatttctccttttaaatattcatgttgagtgtgcctaatactctcctcgacaagtcatgctgttttatgcagaataatccaggcgtgagagtgttctcttgggaaatgactggggagacacctgaaaggagcaacctccagatgttcttccctgggtgttgatgtcatgacagccatacagtgagtttgttctgaaacatctcttgctaaatgtgggtcatgctagacacagcataaactgagggtgtgggttctggctttgtacataactcattttctcccttgctttttctctggaccatcctggctggaaacttggctgtagacatctgaagagggtgcaccttttctctttactgtgactcacctcaaatatggcattgctcaaatctgctgtgtatgaggtcacagggcccagctgtggcaggggtgagtgcattgaagaagtaggttttggagccttccaggaattccttgttgacaacaggggtacactcacacagacctccaagactttcttctccacctcttctttttctcatgccctgccttcatctgtctccttctgcacccagagtaggggtggagtatacccttgccatgtgttagtgaaaatgtgtgcagtgagaagccagttgggtcccctcggctcctaatctcttctcaaaactcagtagctcaggttctctggagccatccggtgcattccttgctattggagctgtttttccaagcaatatctgggaagagatttctccctctagcacttgctacctctcttctgcacacatatcacacatcagtactgtggagagtttctgttaggaaaagccatacatttttaaaaatgtagcaaaatgtcaagggaaatgtaatcagatttggccagagttcgcctacagataagaaggcactgggccaggctcacacctgtaatcctaagtaacactttgggaggctggggcgagaggattgcttgagcccaggagttcaatacctgtctgggaaacacctcatctctacaaaatacaaaaaagttaactgggcatggtggagcatgcctgtagtctcagctactcaggaggctgagatgagaggatcacttgagcctgaggaggtccaggccacagtgatctgagatcacaccattgccctccagcctgggtgacagagtgagaccctgttccaaaaaaaaaaaaaaacccaaaaaacctcaatggctttttgcttttgaaggtggtatgaagagaacgtccactttaaggctttaaaagacagtgaagctggttgtagggctcacttttataatcctaggatttggggaagctgaagcagaaagattgcttgagcctgggagtttgagactggcctgggcagcatagcgagaccccatctctatataaaaaaaaagatgttaaaacagtgaaattacagaaacagaacatagccaccctgtttcatcagtgaccttttcttcacgtgacggtcaactcagtaggtgagaataattagtaggttcagcagaataaactctttacaattaataactcagtggaaaatgatgttcagatggtgaaatgtggaaatgttttagacaactctattttcagcctgtgcttctcactcaccatcctgttgggattaacagttgagggccatcgctgcctaaacatttagcgtgcggtttcccatcagttttactgtgaatgtgaaaaggtgaaactgttgctgacttcggcagcaggtatactaaaattggaatgacacagaggagattagcatggccccctgcgcgaggaagatccgcagattcatgcagcattccatatttttttaaaaaaaggttacactgtgcaccgacgtggagctagaaggaaaagcatgaagtctcatgtttgctgactataaaaataaatcatagtaataatattattgaacattctactttaaaaattattaataaaaccataaatgaaacacttgagcacactttaaaaagtacataaacccatgagtccatatgtgtaattttatgttgtctgttttattatccaggatttcatactcagatgagcattagcatcaggaaagcctgaaatgccttaattgtgaactgatacgcaggaaaatgaaatatgtaagcacattggtgaccttgttctttacagacatcatgatcagcctccagccatacagaacaaatgagaaattagaagcaattccaagaacgtgtgatggtgtgaaacccacttttgaccgtcacacacatttcagcatttgaagagacacaggctacctggaaactgcccatggcggggtcataatttaaatgtcccaatgtcatatagaggttaatttaatcaaaatgagctaaaacatggaacaatcactgaataatttaaaaagagtttacctggcagagtgtgtcatgcctgcaatcccagcactttgggaggccaaggcaggcagatcacctgaggtcaggagtttgagaccagcctggccaacatgatgaaacccttgtctctattaaaaacacaaaaattagccagatgtggtggcacatgcctgtaatcccagttagtcgggaggctgaggcaggagaatatggaactcaggaggcggaggctgcagtcaaccaagattgcgccactgcactccagccagggcgaaggagtgagactcccatctcaaaaaataaaaaaaaaaataaataaaaatagttgacccgggtgggcattccaaaatgttcccatagatgatcgtgaaacaatcactgtgcaaaatgtagaggaaaattcttacgataatcacaaaatttgtatcagaaaaacattacaaatttactttgctccatgtaattttatgaattggcagtattttcttaaattgggatacagtaagagaatatctttaggaaatggaaatgttaaaacaagaagtaacaagaggttgtttttctgaagggaaatgccaccggcctgctttcataggcattgataaagccaggaaggaaataaagtcacaaccgaatagtatacactgtatctactgaattcttctaattccttcacaacagaagtctaaatcctgcttagcctaaacatatctatagccagcgatgggcaaattatatttgctgtcagcatgatggaataagaaacagaaaccccccagcagtggggtaagattgcacgcttcatcccctcaaaatgcagttcagccccactccctctccatgcccatcaaacaactgcaaaatcacttgttactgaatttctcattcagcgttttgtttctttctgtccatacttaaagaccaaattatttgtttgctttgaagaaaaagcaaaagcaacaaaaacaccaaatcatttgaaatcactacccattaaaaaaaatcaccagtggaactaaacagttgagtggtttgggatgtgttgttcgccatttctgtgtttgacctacatggtctctagttctttggacaattgtaactgtgaaactatggcttaacactgttaaagactccaaggctccactctgtagccaggtgcaactcaggctgcacaaataccccaccagaatgtcacaatcattcattgctccagctgctgagtgaacagagtgcaagacagcactggcttgggttttatttttgcagccagttaactttgcatcaggtctacacagtccttgcagcctttgatttctccagttgtacagatttgaaatggggtgcccgggttcctctcgtttttccttcaatctacctagcatgcattttacacacattggaggagtcgtatgcactgtttttctcttgctgatggaggcaagaacgccttctaattagtataacttaaatggacgggattcacttaaaagcaagaagaaaagcacatgaacaggtgtcttaatgcatttggatactttggggtgtgtgcctgtctgtgtgtgtgtcttggtgaaggtgggctgtattttcaccaagccttttcataatcaagtttgctttgcaaaccatctggccttgcccccagcagtacagtccttcctaataacggggatgctctgtcatgtttctctgtaaattgttgtgtgttgggaagttctgttgaggcttagtttgatcttccatggtggacatgtctgttctgtatataaaaagcattacatctgtgttttagcaggtgggatttgaagcttttccacagtccttgtgctctgagatggctgttgagctctgctcagctgtcacagctgaattctttttttgtgctgaacactgggcagcctcaccttgttgccaacgtgcttctggggcccctgtgactgctgccggatgctgtgcacacaggcagagtgccttggcaggtttgtgcaccccttggcgagccagaactgggaaccccgcggagtgaccccaccttctcatggggggtcagggaggggagtgcctatttttaatcttgtttgttgcgcaatggaaatcactgtgatttgtacatatgccctaggaaaattttaccgctgtctaatttatgtaataatactgatgattctaggtttgtttaataaaactttatatcttttcag

SEQ ID NO: 17494 - DNA, 188 bp, Homo sapiens
atatgatggagcatcagattttacctaatacagcagaactcctaaaaagttacagccatatgcaggacggcagtactcagcatggtcttatgcacaggaactaaaggaaaaagagatcgagtcacaaaaattcaggaagagggggtaaatgtggattgtatggaatgaaaaataaacattctcaagga

SEQ ID NO: 17495 - DNA, 1427 bp, Homo sapiens
aaagcaataattaactgcttcctttatgactatgcactaaggtcttatagtccaaactttctctgtgtctggctagtattgaaaactagataaactgctccaaaccaacatggagtaaagagcatattcactggtttatttgcagtaatttgcaatttgtcagtgtataagacacatgcagggtgaagtgtacagagttttgtaacaaatgactggtcctaatctgtaaatgagaaaggtatatatactatgttaatgtctgactgttaattcttaagcaagaaactttttttgatgaaaacaagtcagatctacacagtcacacaattattttttgttgtgttcactacattgtgcaattgatattgcctgctttgagcagtttggtcaacttaccaacttccccccaaaaaagggaacataaaagagcccatctttgtcagtttacaccaatagtttcttgttaatccttctttcctggatatataaggctggtggtaacttttgaattatatggttgatgtggaaaattggcagtgtaacatttctagatacttttcattacctttttattctggtatataggctaaccactttaaagctattcttatgctgtaacagttagcatggcttcacactgtttgtgtagccaagaggacagaattacatgaatgacagtgcccagagtgacagctgtatattgctcagagcttttatttcttatacctagaataaatataaaatgggggaaaaatgtgacagacaagcagtttttcattgcacacatattcttcacatttaatgtttgatagttcaatttcttgagctgaagaatatcaaagtatcgataatacgaattttaaaatattaaaaccaatacacaaaattttcctatgtcagaatgtggtggagcataatagattgtatttggtgtgcttgcgattttttttttccatagaatttattaagtgaagtttctaaaactttgcttctcctgatcccggtgaagtgtacatcataagaatccatagtactttgaagtaccattgcaccaagatgtctgactgaattcatagtcacacttttatttgaaagaaagaattgttgtagttttttttcattattctaaaactcttgttgttagatacaagatttaattaagatctaagctcctgcttatttaatgtaattctaaggtaccattttagaaaaaacatttgttttaagattccaagaaacctgtgagttaatactatatttaaaagagaattggtaaattttgaatgtgtgtaatattttggaacctgtttaaaaaccaaatatacctgcaaatagatacagcctatcctatactatttaaatgtttggctgttttgttttatagaaattattttgctgaattcacaaataaaatttaagaagacttt

SEQ ID NO: 17496 - DNA, 2358 bp, Homo sapiens
atctgctttgcagcaaagtcacccttacaaagaagctaatatggaaaccacatgtaacttagccagactatattgtgtagcttcaagaacttgcagtacattaccagctgtgattctcctgataattcaagggagctcaaagtcacaagaagaaaaatgaaaggaaaaaacagcagccctattcagaaattggtttgaagatgtaattgctctagtttggattaaactcttcccctcctgctttagtgccaccccaaactgcatttataattttgtgactgaggatcgtttgtttgttaacgtactgtgactttaactttagacaacttactactttgatgtcctgttggctcagtaatgctcacgataccaattgttttgacaaaataaatttactaaacttggcctaaaatcaaaccttggcacagaggtatgatacaactttaacaggagtcatcaattcatccataaatataaaaagggaaaaaaacttaaggcagtagtctgcattaggactgtttgagttttgcagacttggggttgggagaacatcttaaagcattaaagcatagttttttgtatggccaaccttactaaattaagttctgacttgctcactctatcctggataggcacttgggaacttacactctttaagccattccagtcatgatgaggtggaatgtatcagtataccaattaatatttttgaaagagctcttttaggttaatttaagtacagcaatttctcatgtaatgtttagggagtttattctaacctaggcaaacggcatgctatcacaagaaaggtttaaagctttgataaaatgggggagatttaatcagtttttttaatgcctgctataaaaatttgaaatattagaatggccgaccatggcagtgaccaggcctcactacaggcctggttggattctggtctttaatgcatgctagtgttgatgttttttggtcaagaacggtttaaacaggaaggattgtgcagcaggctttaatttaatgtagattcatactgctctgttaaagctgcattgaaatgttaaaatggcttacacttgcagactttgcaaatcttaagactaacaaatccttgaaatcacacagcttgcaaatacgtactaaactgcacaaggtgtgtgttctatatgtgcagttttagcgtattttagttgcataggtttccatggtatttatagtctcttgtgctaaatttggccaaagatgattgtccaccactaaaaatgcctctcccacttggaattctgtactgattttgtggccagatgcaatgatctttaaaaacaaatcttttcaatggcataagaagttgacaaaaatttcttaaagtgcaatagattttcaagtgtattgtgccttgttctaaaacttttaagtaggtgcacttgacagtattgaggtcatttgttaaggtgctatttcaattagtgtaggtttagactcttgtacatttctcccataactttttacaaagtattttgttgcacattcagagaattttatatatatatgtcttgtgtgggtgtcctcgaccttccaatcttatttcgtctcttggagattgttgaatgcagccagtgaagaagtagattcctaaattttattggggaccatggaatggtagttgagaagaaaactatttgcacacaacagattttagatactttttgctgctagttgtgtaatatttattgaacattttgacaaatatttatttttgtaagcctaaaaatgattctttgaaagtttaaagaaacttgaccaaaagacagtacaaaaaacactggcacttgaatgttgaatgtcaccgtatgtgaaataatatattttggggtagtgtgagcttttaatgttaagtctgttaaacttgagtcaaattaagcagacccggcattggcaatgtagctgtaattttctgacaaaatttaagacaaaattgtcaacttgaaactaaaacatgccaaggttttgatatacttgtcttaagatattaatgaaacacttctgaacactgataggaagtgtccacatccacaaagtttctcttgagttttgttatgtgttttgttgtgtttgattttcagtgattgtctggtatatttacagtcctcaaacatggttatttctgtcagtgacttaacattcggttttatcagccagcagtattcttcagtaaataaagaatggaattgctgaatgtaatcattgaacctcgagtcactgtaaaagttcagtaattgcttattgtattagttttagatgctggcactgcatgtgctctgtttattctgattttactaaaataaaaagttcaaaagtctt

SEQ ID NO: 17497 - DNA, 758 bp, Homo sapiens
acaggcatgtgccaccaatatctactgtacattctacaagcattgctttcttattttacttcttttacttgtttaacttggttagatgcaaacacgttggatgagtttgaaaggactatgctgcccttttgacatcaaagacctgctgacaatggaggccacgcctgcttctcccatcgcctgtctggctggcagggaaggaaaatagcttgaatgttggtgaaagacttagcggagtgggagggcagtgaaatctagagtaaaaccaagttgggccaagtgtcctgcagaatctaaaatgaagtttaatcagcgtgccatttttgttgttgtttgaaagattttaatttttggaatgcacagtttttatttaaaaaagacatttttaaaccactgcttgtgagattgcttgttgattggaaagagtgttttattcaccatttaaacgtttgcaaagtggcgtgccccttggcctcacaggcaaagaataacttaaaagctgacgatttgaataaattatgttacagtatgaaatatgttttacctggatatgtaaaataccttctttattctagctaattgggagatgattttttttggctaattgagattacctttagattatgttttcaaaactggcttatactgtaatctacaactaataagcactaatttagagttcagctatattgttgcatgtagtgagaagggacttaattacaaacttaagacgtaagtgtgcaataaagtaagctaag

SEQ ID NO: 17498 - DNA, 98 bp, Homo sapiens
gcagcaactaagtttaggcccagctgccagacctcagagatctcaccagcagggtgcttcccatgttgatgacaataaaatgaatgtgttgcaaaccg

SEQ ID NO: 17499 - DNA, 2385 bp, Homo sapiens
cttttccctatttcccctcctatccctctgcccctactgctcagcaatgtaaaagagacaaataaggagaaagaaaatctccaaaccaggaatgtttttgtgccactgactttagataaaaatgcaaaagggcagtcatcctgtcccagcagacccttctcattggcattttccagtattgtgagatcaatttctgaccatatgaaatgtgaaaagtatatgtttctgttacaatactgctttaagatctaaaccatgccaacagatgtttcgtgtgactaggacatcaccatttcaaggaactgtgtgtttccaacatcatggtagcagcacacacttccaaagctcagccagggacacttaatattttttaattacaatggaaatttaaacatttttatgtgggctacacaatggatggctcttcttaagtgaagaaagactctataggcttttacacagcacatgaagcagtaatccagaaagaaggaaatgcagaattttattatcaaagtaagcgaattgactgtgcagaaaaattgtagggttctgtggaaggaggtattctgccagcctgaactatatttaagaaactttgtaaaaaataaaaatgtatatagctgtgagctcaaacaaaaactgcagacaaacaaaaaagagaaaagcttttatttgtgttttcagtttgaaagaacttttagcaaggttgtgctttcaaacacatattagtcctaccaccttagttcctctacagcaaaagaggcttttcttcttaattacatgtaaacaaagacatgggattttctgacgtaagattttcatttgtaggaatatgtgatgtcaaatggaagactcagaagttttgtgtggcctatttctccctgtcaggttgcacagatgcatgtagagcattcttaggagaccattgttttagaaaactttgatttgtacatgttagttttcatgaaattgcaacacagagataggtcctaaaagtggaatgtatttaaaacttgttgaattagacacacacacacagacacacacaaagaatcagcagagaaaacaaaatacaagtcctgttctgtagttcttgccctttgaatatatttgggaagagttgcttcctatttcaggaccctgccaaaaaagaagaaagcttgcctttggtggggctatgccccttggagtaaatacagctctgtgttccctagcagctgccggaggatttggctgatgaagtacctgctcagcttagctaatcagattaaaggaagacatgtatgtcttttgtttaagcacctagtcccttatgtatcagtaaacaggtttttaaaaatcttttatgtcatttataggataaaacatatgcttgtctgaaaatatcaccttttgtggatttatctgatcaccaaataataaatattaagaagaatgggggaaaaaggatagaatattaaaactgctttgcataggtttttggggaaattaggatatcttcactgacaagacactgaatggaatttattcacccattttaaattggttacttggggatcagagatttgtctctccaacagcttgtggttttcttattactcattttcaggaaagtttgtagtattacaaggcagaaggaaacacagtagcaatggttgctctatattttgtctttcaaagattactgcattaccaagaaacagtagccaaagatgtttgaagatcatgtcccttagctgcattgtgggttattctagaaatccaatgttaaatgcctctactaaagtggggattccccataaaaattgtccagctacctgactcttttgcaataacaactttgattactgaatccatacactcaaactatagtgatatatcagtgtttgggagtgacctctagaaaaaagaaaactgtttttagaaatacataaaatcacttccaaatcctgttgcttatgttgggttaaatttgaaagcaattctctatatataaatatgtgaaatattatgatctgaacttagcacacatgaagcaacatttctttgctacacagaggtgtcttggaaagatttcattcccaattcatttttcatagatctataatcaggcaatttctgcaagcaatgtatgaccccacctgagcaaccacaaataggctctccatgaaactgcaaaggaactgatgtgtggcatccatgctggttttgtctgtctataatatgaattcaagtatctgttcatatttccaattgtctcctgctagcaatatgtgccacaacatgacagtcttgtgacatcttaaggaaaagaagagttcctgttaaatgaatagctttagcttttacaggggattatgattaaaagtgatttagtacatctta

SEQ ID NO: 17500 - DNA, 562 bp, Homo sapiens
tcatgctagtatatgctgccatcaattctcctgcttgtcagcagtgaaactgcagctgtcaaatgaggaattgataagagacacgaggtgggacatacaatcctacactacagatttcagtttttagaaaatgtgataataatattgatatttagtttctttggagggaacgttttaccgaagtgttgtgactcaataattgccgtgtagttcatcaaaacctacatattagcctttggctttaagctccgcttctgtcagtatttgcaaccaaggtggtcgggcaaagtattgccaggagatactgaaaatcatccagaagcactgtgatattgtgtaagcatctggagaaaattcagttaaaagaataaaagtaagcagctgaggaattactatcactcatggagaagggtaggatattttcaataagtgagtatgcaatatccatatatactttcacagaacaaagagtaaagaggctgagtgtgactttataaagatactcataaaaaatataaacaacaaaaccttggaagtagtttctaataaaattgatttttct

SEQ ID NO: 17501 - DNA, 327 bp, Homo sapiens
tccttagaagttagcttgtccgcatctgaaaattcacttttaccttgaagttcaatctgtctctgggaaagactagattggaagaataaaattcaagaatgtgatgttttagtaatggaaaagccaagagcgtcaggtggcaaaagtccttctgttactcaagaaaatgctctgaaaaattccttttctcttttttttttgtaaagattaactccacctcaccaccacaatgaggtatttttctcagcaattgacacctgtttactcagttactccctgtaactatgttatgctgtgaagtaggcaatacagttgttaaagaagaat

SEQ ID NO: 17502 - DNA, 120 bp, Homo sapiens
tctgccattaaaagaggaccagattatgaatgacaacagagactaacatttacattgacaaaaaaccctaaaaatttctgcaattatcttattgaacaataaaattgcatgtttacttct

SEQ ID NO: 17503 - DNA, 320 bp, Homo sapiens
aagagtttgttttgaactatacgatttgaaacaaaattctttttttggagactatggaaacattctcaacagggaaaccctactagactttgtaaagcaaataatggaaaagatacagaactttttgaagaatcatgggaaatttttataattaaataaatgctaaaattctgttttgtgaaacatttatgggaattatcactgacagtttttgtacactttcaaatagtgttaaagcagcaactccatgttgtaaatgcacaaaacaaatatttagttaataatcaactccaagaataaagctgtaacaataatagtta

SEQ ID NO: 17504 - DNA, 375 bp, Homo sapiens
gattaagtgtgatcattgtactgatggatatattttgtgtacatgtttctcttttagttgtaactattgattttgtaatgaaaatttcctctcctttttctaccatatctctgtttttttagaactactcaactgtgtggtaacagaaagcttcttaccaatttccccaactatgttgcacatcagcctcattttccccctttattggaatgcatgttttcattgccttctcctttcaaagtgtacgtttgtgtgttcatcaccttaaattatcttaatttgagacttttttataatggtttcgtaatgtgaaatcaaatactaatttaaactctggagcccataatatctacataaaagaaaatataaactgac

SEQ ID NO: 17505 - DNA, 807 bp, Homo sapiens
attgaaccaagtgtttttacatgacaagttctctgaggatggttctacagttgggattttggccatcatcaaccaagaagagaaattcatttagtgtgtagtttctgaaagcaaactgatttattttcattgttttaaagtatttatttctttaaaagctgaggacactgaattaccttaagttaaatgttaatactttattgttttgatgtaatggaacttaaggataaaagaccataatatttgctgttaaaataaataaacgagtgcctttcctactgtgataacgtcaagtaattggatattttgaatacatttctgcctgataatcatgctgggttctaataagccctacttccacctaatctgtttacagtcttttggtatgtttcagttacttagatggtctcataaggtttctgatacaatttgaagacagaaatctgcatttagaatcagaaaacatggacatatttttcatatttatctagtcatatgtaattttatgctaacattgatagtttataaatccttttcatcctttgtgcctcggttattaaggaaaaaaaaatgtccaacatacagtttttaaagtgtggcagttttgagtagtaacttagaatgtataagattaagagttaaagaaaccgaacaataagtggcaaccaattatcttaacattggaaatactggggtgccattttgttttcaaaagttattcattgtaatccactgttttggctttcatgaacaagtaaattacagtgtataaatgaaaagcaatttcataataaattctataaactg

SEQ ID NO: 17506 - DNA, 276 bp, Homo sapiens
agcaagcattgaaagtaatagttattgcataccaatccttgtttgcaaatcaaaaattgaaatgttatttctgcattgttacctgcatattactgaaagaaacatgttggttttgtggagagaggtagatactaacttcctccatgaattttttgaggtattcaaaggaaaaggaattgttttcaaagtaatttcatacttgttgatgctatttgaaaagtgtttagatgtaatatctaccttaaaattttcacaataaaatttgacatgtactgc

SEQ ID NO: 17507 - DNA, 276 bp, Homo sapiens
agcaagcattgaaaataatagttattgcataccaatccttgtttgcaaatcaaaaattgaaatgttatttctgcattgttacctgcatattactgaaagaaacatgttggttttgtggagagaggtagatactaacttcctccatgaattttttgaggtattcaaaggaaaaggaattgttttcaaagtaatttcatacttgttgatgctatttgaaaagtgtttagatgtaatatctaccttaaaattttcacaataaaatttgacatgtactgc

SEQ ID NO: 17508 - DNA, 276 bp, Homo sapiens
agcaagcattgaaaataatagttattgcataccaatccttgtttgcaaatcaaaaattgaaatgttatttctgcattgttacctgcatattactgaaagaaacatgttggttttgtggagagaggtagatactaacttcctccatgaattttttgaggtattcaaaggaaaaggaattgttttcaaagtaatttcatacttgttgatgctatttgaaaagtgtttagatgtaatatctaccttaaaattttcacaataaaattttacatgtactgc

SEQ ID NO: 17509 - DNA, 567 bp, Homo sapiens
gcctacttcatctcaggacccgcccaagagtggccgcggctttgggacacctggggtcgggtccaccatgaggataaaacctccttctcttctggacatgtccaggagtggccgttgctacaagtcacctggtgctacgaccagggtgagaataaagacgtctcctcaggaccctcccaggagagtacatggcattgagacatctggcggccaagtgaggaaaagacaccctgtctgcagcacccagaactgaggaggggcactgccctgggccttacttcccagccctggcctccaattctgaccttacaaaagtgtcccttgagtgaggcagtgaccacgcattgtcacagctaccaaagtgtggtttgcagatgatctgggcttgtttctggcagagattctggtacagagaaaggagaggcgctgagtggaaccacgatgggctgaggccaggggagacatcacaacctccaacaacactttttttcatgctttaataactcatttttcttagagaactaaagtagttgaaacaatatagaaacattttttaagtaggcatat

SEQ ID NO: 17510 - DNA, 537 bp, Homo sapiens
gtcctgcccactaaaagaattgtgacataacgctgactgcaaaaactgggtaatgcaactctcctctttattctggagtctgccaaaacaagggattatcacatattgcggagtccagcacccaggtgatgtgagtcttctctgtttctctaagattataatgtatcctgagctcaccatccaggtgatgagactctcctgctctgtttctgcccgcaggtaaaattttgtcatatacccagcttcagataccatgcaataatacaactatcatacctggacccaaagaggagagatattttgattctcattgccattcttatggccacaagcaaagtaatggttctcatagtggtataaagttcacacagtattatgacactcccagcgtatcatagaaaatgtgagtagtacaatgagtgttataacagggaacagcaaaccaatgctattgtgattattggattcacacccagctgacgcgactatcattctctcacaagaacagaacctgcaaataaagtactaaatctcacc

SEQ ID NO: 17511 - DNA, 1850 bp, Homo sapiens
ggtaaaagagtgcatcgctttagaagaagtttggcagtatttaaatctgttggatcctctcagctatctagtttcatgggaagttgctggttttgaatattaagctaaaagttttccactattacagaaattctgaattttggtaaatcacactgaaactttctgtataacttgtattattagactctctagttttatcttaacactgaaactgttcttcattagatgtttatttagaacctggttctgtgtttaatatatagtttaaagtaacaaataatcgagactgaaagaatgttaagatttatctgcaaggatttttaaaaaattgaaacttgcattttaagtgtttaaaagcaaatactgactttcaaaaaagtttttaaaacctgatttgaaagctaacaattttgatagtctgaacacaagcatttcacttctccaagaagtacctgtgaacagtacaatatttcagtattgagctttgcatttatgatttatctagaaatttacctcaaaagcagaatttttaaaactgcatttttaatcagtggaactcaatgtatagttagctttattgaagtcttatccaaacccagtaaaacagattctaagcaaacagtccaatcagtgagtcataatgtttattcaaagtattttatcttttatctagaatccacatatgtatgtccaatttgattgggatagtagttaggataactaaaattctgggcctaattttttaaagaatccaagacaaactaaactttactgggtatataaccttctcaatgagttaccattcttttttataaaaaaaattgttccttgaaatgctaaacttaatggctgtatgtgaaatttgcaaaatactggtattaaagaacgctgcagcttttttatgtcactcaaaggttaatcggagtatctgaaaggaattgtttttataaaaacattgaagtattagttacttgctataaatagatttttatttttgttttttagcctgttatatttccttctgtaaaataaaatatgtccagaagaggcatgttgtttctagattaggtagtgtcctcattttatattgtgaccacacagctagagcaccagagcccttttgctatactcacagtcttgttttcccagcctcttttactagtctttcaggaggtttgctcttagaactggtgatgtaaagaatggaagtagctgtatgagcagttcaaaggccaagccgtggaatggtagcaatgggatataatacctttctaagggaaacatttgtatcagtatcatttgatctgccatggacatgtgtttaaagtggctttctggcccttctttcaatggcttcttccctaaaacgtggagactctaagttaatgtcgttactatgggccatattactaatgcccactggggtctatgatttctcaaaattttcattcggaatccgaaggatacagtctttaaactttagaattcccaagaaggctttattacacctcagaaattgaaagcaccatgactttgtccattaaaaaattatccatagtttttttagtgcttttaacattccgacatacatcattctgtgattaaatctccagatttctgtaaatgatacctacattctaaagagttaattctaattattccgatatgaccttaaggaaaagtaaaggaataaatttttgtctttgttgaagtatttaatagagtaaggtaaagaagatattaagtccctttcaaaatggaaaattaattctaaactgagaaaaatgttcctactacctattgctgatactgtctttgcataaatgaataaaaataaactttttttcttc

SEQ ID NO: 17512 - DNA, 537 bp, Homo sapiens; identical to SEQ ID NO: 17510

SEQ ID NO: 17513 - DNA, 1850 bp, Homo sapiens; identical to SEQ ID NO: 17511

SEQ ID NO: 17514 - DNA, 134 bp, Homo sapiens
gacaatcgggtaacattggctacaaagacctacctagatgctcctttttacgataacttacagccctcactttcttatgtttagtttcaatattgttttcttttctctggctaataaaggccttattcatttca

SEQ ID NO: 17515 - DNA, 154 bp, Homo sapiens
aagaccagaatatgagacaggaactgaagtaaacactttagttgctttcagggatgacacaagcacacaatgatttttgcttacaatcacttaacttagcaaattctgtaactaaaaatgtaccaatagtagacaataaaatgttttaaaaatc

SEQ ID NO: 17516 - DNA, 1473 bp, Homo sapiens
tatagttccatgaatattaaatgagattatttctgctcttcaggaaatttctgcaccactggttttgtagctgtttcataaaactgttgactaaaagctatgtctatgcaaccttccaagaatagtatgtcaagcaactggacacagtgctgcctctgcttcaggacttaacatgctgatccagctgtacttcagaaaaataatattaatcatatgttttgtgtacgtatgacaaactgtcaaagtgacacagaatactgatttgaagatagccttttttatgtttctctatttctgggctgatgaattaatattcatttgtattttaaccctgcagaattttccttagttaaaaacactttcctagctggtcatttcttcataagatagcaaatttaaatctctcctcgatcagcttttaaaaaatgtgtactattatctgaggaagttttttactgctttatgtttttgtgtgttttgaggccatgatgattacatttgtggttccaaaataatttttttaaatattaatagcccatatacaaagataatggattgcacatagacaaagaaataaacttcagatttgtgatttttgtttctaaacttgatacagatttacactatttataaatacgtatttattgcctgaaaatatttgtgaatggaatgttgtttttttccagacgtaactgccattaaatactaaggagttctgtagttttaaacactactcctattacattttatatgtgtagataaaactgcttagtattatacagaaatttttattaaaattgttaaatgtttaaagggtttcccaatgtttgagtttaaaaaagactttctgaaaaaatccactttttgttcattttcaaacctaatgattatatgtattttatatgtgtgtgtatgtgtacacacatgtataatatatacagaaacctcgatatataattgtatagattttaaaagttttattttttacatctatggtagtttttgaggtgcctattataaagtattacggaagtttgctgtttttaaagtaaatgtcttttagtgtgatttattaagttgtagtcaccatagtgatagcccataaataattgctggaaaattgtattttataacagtagaaaacatatagtcagtgaagtaaatattttaaaggaaacattatatagatttgataaatgttgtttataattaagagtttcttatggaaaagagattcagaatgataacctcttttagagaacaaataagtgacttatttttttaaagctagatgactttgaaatgctatactgtcctgcttgtacaacatggtttggggtgaaggggaggaaagtattaaaaaatctatatcgctagtaaattgtaataagttctattaaaacttgtatttcatatgaaaaatttgctaatttaatattaactcatttgataataatacttgtcttttctacc

SEQ ID NO: 17517 - DNA, 193 bp, Homo sapiens
gtgccttctgaaactgctgcagtttctctttgggggtattggtagccattcagtatttttttcaaaagaattctgttgacattaaatgatatcagcagtccagaagtcttggcaaaatgtaataagatgtaaataatcttatatattcataagtgttataaaatctcataagattaaaatattgccttccctt

SEQ ID NO: 17518 - DNA, 79 bp, Homo sapiens
acttttaaaaatgtaagcaaaattacagtatgtaaaacacacattgctaatggagaaataaagttcctactttacatct

SEQ ID NO: 17519 - DNA, 1827 bp, Homo sapiens
gagactcaggccaagaaacgtcttctaaacttccccatcttctaaacccaatccaaatggcgtctggaagtccaatgtggcaaggaaaaacaggtcttcatcgaatctactaattccacaccttttattgacacagaaaatgttgagaatcccaaatttgattgatttgaagaacatgtgagaggtttgactagatgatggatgccaatattaaatctgctggagtttcatgtacaagatgaaggagaggcaacatccaaaatagttaagacatgatttccttgaatgtggcttgagaaatatggacacttaatactaccttgaaaataagaatagaaataaaggatgtgattgtggaatggagattcagttttcatttggttcattaattctataaggccataaaacaggtaatataaaaagcttccatgattctatttatatgtacatgagaaggaacttccaggtgttactgtaattcctcaacgtattgtttcggcagcacttatttaatgccgatatactctagatgaagttttacattgttgagctattgctgttctcttgggaactgaactcactttcctcctgaggctttggatttgacattgcgtttgaccttttatgtagtaattgacatgtgccagggcaatgatgaatgagaatctacccccagatccaagcagcctgagcaactcttgattatccatattgagtcaaatggtaggcatttcctatcacctatttccattcaacaagagcactacattcatttagctaaacggattccaaagagtagaattgcattgaccgcgactaatttcaaaatgctttttattattattattttttagacagtctcactttgtcgcccaggctggagtgcagtggtgtgatctcagatcagtgtaccatttgcctcccgggctcaagcgattctcctgcctcagcctcccaagtagctgggattacaggcacctgccaccatgcccggctaatttttgtaattttagtagagacagggtttcaccatgttgcccaggctggtttcgaactcctgacctcaggtgatccacctgcctcggcctcccaaagtgctgggattacaggcttgagcccccgcgcccagccatcaaaatgctttttatttctgcatatgttgaatactttttacaattaaaaaaaaagatctgttttgaaggcaaaattgcaaatcttgaaattaagaaggcaaaaatgtaaaggagtcaaaactacaaatcaagtatttgggaagtgaagactggaagctaatttgcattaaattcacaaacttttatactctttctgtatatacttttttttctttaaaaaacaactatggatcagaatagccacatttggaatactttttgttatcagtcaatatttttagatagttagaacctggtcctaagcctaaaagtgggcttgattctgcagtaaatcttttacaactgcctcgaaacacagaaacctttttaaaaatagacactccccgaagtcttttgttcgcatggtcacacactgatgcttagatgttccagtaatctaatatggccacagtagtcttgatgaccaaagtcctttttttccatctttacaaaactacatgagaacaaacagatcgaaccgttttgaagctactgtgtgtgtgaatgaacactcttttgctttattccagaatgctgtacatctattttggattgtatattgtgtttgtgtatttacgctttgattcatagtaacttcttatggaattgatttgcattgaacacaaactgtaaataaaaagaaatggctgaaaga

SEQ ID NO: 17520 - DNA, 578 bp, Homo sapiens
cagtggcaccaaaggtcatttgtggttgtttttgtttgtttgtttcttaaatcctactatctcctggcctggacctcagaaggagctttttgcttatctataatttttcactgccaatttttgatatcctctctcctagagttactgttaaaaggttggttcgtaaagtccacaccccgatgctcagaagtgtcttgccagcaacattcctgctagcatacaggagtgatttcctaaaccagtttcattctagtctgaatagggacaaacaaatcttgaggaagcccaagtgcgtacctttatttttgcccccaccaccctctttctgtacttcaatttttgtttgttttttgtttttttgtccctgtcataaaatattttggtgcttcaaaacttgtaccttcattgtacatccttttcttttctccccttgggtcttattataaaagaagacaatgtacgttgtaattaccaaaaagaatagggaaaaacaagaatttcatgactctacctgtggtctatctttaatttcatttcttttgttaaaaataaaacaatgagtatgtttggatactatg
